(19) United States
(12) Patent Application Publication
(10) Pub. No.: US 2024/0158795 A1
(43) Pub. Date: May 16, 2024

(54) Treatment Of Kidney Diseases With A Combination of Angiopoietin Like 3 (ANGPTL3) Inhibitors And Solute Carrier Family 5 Member 2 (SLC5A2) Inhibitors

(71) Applicant: Regeneron Pharmaceuticals, Inc., Tarrytown, NY (US)

(72) Inventors: Mary E. Haas, Tarrytown, NY (US); Kishor Devalaraja-Narashimha, Tarrytown, NY (US); Luca A. Lotta, Tarrytown, NY (US); Lori Morton, Tarrytown, NY (US); Aris Baras, Tarrytown, NY (US); George D. Yancopoulos, Tarrytown, NY (US)

(21) Appl. No.: 18/505,742

(22) Filed: Nov. 9, 2023

Related U.S. Application Data
(60) Provisional application No. 63/424,399, filed on Nov. 10, 2022.

(51) Int. Cl. C12N 15/113; C07K 16/22; C07K 16/24; C12Q 1/6883

(52) U.S. Cl. CPC C12N 15/1136; C07K 16/22; C07K 16/24; C12Q 1/6883; A61K 2039/507; C12N 2310/11

(57) ABSTRACT

The present disclosure provides methods of treating a subject having a kidney disease or preventing a subject from developing a kidney disease by administering an Angiopoietin Like 3 (ANGPTL3) inhibitor and a Solute Carrier Family 5 Member 2 (SLC5A2) inhibitor, and methods of identifying subjects having an increased risk of developing a kidney disease.

### REFERENCE TO SEQUENCE LISTING

[0001] This application includes a Sequence Listing filed electronically as an XML file named 381203962SEQ, created on Nov. 9, 2023, with a size of 3,455,297 bytes. The Sequence Listing is incorporated herein by reference.

### FIELD

[0002] The present disclosure relates generally to the treatment of subjects having a kidney disease with Angiopoietin Like 3 (ANGPTL3) inhibitors and Solute Carrier Family 5 Member 2 (SLC5A2) inhibitors, and methods of identifying subjects having an increased risk of developing a kidney disease.

### BACKGROUND

[0003] In the United States, based on data from the 1999-2006 National Health and Nutrition Examination Survey (NHANES) study, an estimated 11.1 percent (22.4 million) of adults aged 20 or older have chronic kidney disease (CKD) stages 1-3. An additional 0.8 million U.S. adults aged 20 or older have CKD stage 4, and more than 0.3 million have stage 5 CKD and receive hemodialysis. Analyses of NHANES data between 1988-1994 and 1999-2004 suggest that the prevalence of CKD is rising for every CKD stage, but with a particular increase in the prevalence of individuals classified with CKD stage 3. The number of patients with stage 5 CKD requiring dialysis also has increased. It has been estimated that more than 700,000 individuals will have End Stage Renal Disease (ESRD) by 2015. Although CKD can be caused by primary kidney disease (e.g., glomerular diseases, tubulointerstitial diseases, obstruction, and polycystic kidney disease), in the vast majority of patients with CKD, the kidney damage is associated with other medical conditions such as diabetes and hypertension. In 2008, excluding those with ESRD, 48 percent of Medicare patients with CKD had diabetes, 91 percent had hypertension, and 46 percent had atherosclerotic heart disease. Other risk factors for CKD include age, obesity, family history, and ethnicity. CKD has been associated with numerous adverse health outcomes.

[0004] A Glomerular Filtration Rate (GFR) of 90 mL/min or higher (Stage 1) is normal in most healthy people. Usually, few symptoms are present at this stage of CKD. A GFR of 60-89 mL/min (Stage 2) may for some patients, such as the elderly or infants, be normal if no kidney damage is present. A GFR between 60-89 mL/min for three months or longer along with kidney damage is a sign of early CKD. Usually, few symptoms are present at this stage. A GFR between 30-59 mL/min (Stage 3) for a patient is indicative of moderate CKD, and are more likely to develop anemia, early bone disease or high blood pressure, and may desire to see a nephrologist. A GFR between 15-29 mL/min (Stage 4) indicates that the patient has severe CKD and will likely need dialysis or a kidney transplant in the future. A GFR of 15 mL/min or less (Stage 5) indicates that the patient has chronic CKD and have ESRD. The kidneys have lost almost all ability to function effectively at this stage. They will need dialysis or a kidney transplant to live.

[0005] The ANGPTL3 gene encodes a member of a family of secreted proteins that function in angiogenesis. The encoded protein, which is expressed predominantly in the liver, is further processed into an N-terminal coiled-coil domain-containing chain and a C-terminal fibrinogen chain. The N-terminal chain is important for lipid metabolism, while the C-terminal chain may be involved in angiogenesis. Mutations in this gene cause familial hypobetalipoproteinemia type 2.

[0006] The SLC5A2 gene encodes a low affinity, high capacity Na(+)/glucose cotransporter, which is located in the early proximal convoluted tubule segment S1, and has a Na(+)-to-glucose coupling ratio of 1:1. It is the major reabsorptive mechanism for D-glucose in the kidney.

### SUMMARY

[0007] The present disclosure provides methods of treating a subject having a kidney disease or at risk of developing a kidney disease, the methods comprising administering an ANGPTL3 inhibitor and an SLC5A2 inhibitor to the subject.

[0008] The present disclosure also provides methods of treating a subject with a kidney disease therapeutic agent, wherein the subject has a kidney disease or is at risk of developing a kidney disease, by administering a kidney disease therapeutic agent, the methods comprising: determining whether the subject has an ANGPTL3 variant nucleic acid molecule and whether the subject has an SLC5A2 variant nucleic acid molecule, by: obtaining or having obtained a biological sample from the subject; and performing or having performed a sequence analysis on the biological sample to determine if the subject has a genotype comprising the ANGPTL3 variant nucleic acid molecule and the SLC5A2 variant nucleic acid molecule; and administering or continuing to administer the kidney disease therapeutic agent to a subject that is homozygous for both the ANGPTL3 variant nucleic acid molecule and the SLC5A2 variant nucleic acid molecule; or administering or continuing to administer the kidney disease therapeutic agent and/or an ANGPTL3 inhibitor and an SLC5A2 inhibitor to a subject that is: i) heterozygous for both the ANGPTL3 variant nucleic acid molecule and the SLC5A2 variant nucleic acid molecule, ii) heterozygous for one of the ANGPTL3 variant nucleic acid molecule and the SLC5A2 variant nucleic acid molecule and reference for the other of the ANGPTL3 variant nucleic acid molecule and the SLC5A2 variant nucleic acid molecule, or iii) ANGPTL3 reference and SLC5A2 reference; wherein the presence of a genotype having the ANGPTL3 variant nucleic acid molecule and the SLC5A2 variant nucleic acid molecule indicates the subject has a decreased risk of developing a kidney disease.

[0009] The present disclosure also provides methods of identifying a subject having an increased risk of developing a kidney disease, the methods comprising: determining or having determined the presence or absence of an ANGPTL3 variant nucleic acid molecule and determining or having determined the presence or absence of an SLC5A2 variant nucleic acid molecule in a biological sample obtained from the subject; wherein: when the subject is ANGPTL3 reference and SLC5A2 reference, then the subject has an increased risk of developing a kidney disease; and when the subject is heterozygous or homozygous for the ANGPTL3 variant nucleic acid molecule and heterozygous or homozygous for the SLC5A2 variant nucleic acid molecule, or when the subject is heterozygous for one of the ANGPTL3 variant nucleic acid molecule and the SLC5A2 variant nucleic acid molecule and reference for the other of the ANGPTL3 variant nucleic acid molecule and the SLC5A2 variant nucleic acid molecule, then the subject has a decreased risk of developing a kidney disease.

[0010] The present disclosure also provides kidney disease therapeutic agents for use in the treatment or prevention of a kidney disease in a subject having an ANGPTL3 variant nucleic acid molecule and having an SLC5A2 variant nucleic acid molecule.

[0011] The present disclosure also provides ANGPTL3 inhibitors and SLC5A2 inhibitors for use in the treatment or prevention of a kidney disease in a subject that is: i) ANGPTL3 reference or heterozygous for the ANGPTL3 variant nucleic acid molecule, ii) SLC5A2 reference or heterozygous for the SLC5A2 variant nucleic acid molecule, and iii) heterozygous for one of the ANGPTL3 variant nucleic acid molecule and the SLC5A2 variant nucleic acid molecule and reference for the other of the ANGPTL3 variant nucleic acid molecule and the SLC5A2 variant nucleic acid molecule.

### DESCRIPTION

[0012] Various terms relating to aspects of the present disclosure are used throughout the specification and claims. Such terms are to be given their ordinary meaning in the art, unless otherwise indicated. Other specifically defined terms are to be construed in a manner consistent with the definitions provided herein.

[0013] Unless otherwise expressly stated, it is in no way intended that any method or aspect set forth herein be construed as requiring that its steps be performed in a specific order. Accordingly, where a method claim does not specifically state in the claims or descriptions that the steps are to be limited to a specific order, it is in no way intended that an order be inferred, in any respect. This holds for any possible non-expressed basis for interpretation, including matters of logic with respect to arrangement of steps or operational flow, plain meaning derived from grammatical organization or punctuation, or the number or type of aspects described in the specification.

[0014] As used herein, the singular forms “a,” “an” and “the” include plural referents unless the context clearly dictates otherwise.

[0015] As used herein, the term “about” means that the recited numerical value is approximate and small variations would not significantly affect the practice of the disclosed embodiments. Where a numerical value is used, unless indicated otherwise by the context, the term “about” means the numerical value can vary by ±10% and remain within the scope of the disclosed embodiments.

[0016] As used herein, the term “comprising” may be replaced with “consisting of” or “consisting essentially of” in particular embodiments as desired.

[0017] As used herein, the terms “nucleic acid”, “nucleic acid molecule”, “nucleic acid sequence”, “polynucleotide”, or “oligonucleotide” can comprise a polymeric form of nucleotides of any length, can comprise DNA and/or RNA, and can be single-stranded, double-stranded, or multiple stranded. One strand of a nucleic acid also refers to its complement.

[0018] As used herein, the term “subject” includes any animal, including mammals. Mammals include, but are not limited to, farm animals (such as, for example, horse, cow, pig), companion animals (such as, for example, dog, cat), laboratory animals (such as, for example, mouse, rat, rabbits), and non-human primates. In some embodiments, the subject is a human. In some embodiments, the human is a patient under the care of a physician.

[0019] It has been observed in accordance with the present disclosure that rare ANGPTL3 variant nucleic acid molecules and rare SLC5A2 variant nucleic acid molecules have independent effects on decreased risk of developing a kidney disease. Both the rare ANGPTL3 variant nucleic acid molecules and the rare SLC5A2 variant nucleic acid molecules result in an increased estimated glomerular filtration rate (eGFR). It would have been expected that two genes that each result in increased eGFR could operate through the same mechanism/pathway. If this were the case, the effect of variants in one gene would be expected to depend on whether variants in the second gene were also present. If this were the case, the effect of one gene would have been expected to have a different magnitude of effect when in combination with the effect of the other gene. Surprisingly, the increased eGFR associated with rare ANGPTL3 variant nucleic acid molecules was instead independent of the increased eGFR associated with rare SLC5A2 variant nucleic acid molecules. Therefore, subjects that are ANGPTL3 reference or heterozygous for an ANGPTL3 variant nucleic acid molecule and that are SLC5A2 reference or heterozygous for an SLC5A2 variant nucleic acid molecule have the benefit of being treated with inhibitors of two different biological pathways (e.g., with an ANGPTL3 inhibitor and an SLC5A2 inhibitor) such that a kidney disease is inhibited or prevented, the symptoms thereof are reduced or prevented, and/or development of symptoms is repressed or prevented. It is also believed that such subjects having a kidney disease may further be treated with kidney disease therapeutic agents.

[0020] For purposes of the present disclosure, any particular subject, such as a human, can be categorized as having one of three ANGPTL3 genotypes: i) ANGPTL3 reference; ii) heterozygous for an ANGPTL3 variant nucleic acid molecule; or iii) homozygous for an ANGPTL3 variant nucleic acid molecule. A subject is ANGPTL3 reference when the subject does not have a copy of an ANGPTL3 variant nucleic acid molecule. A subject is heterozygous for an ANGPTL3 variant nucleic acid molecule when the subject has a single copy of an ANGPTL3 variant nucleic acid molecule.

[0021] In any of the embodiments described herein, the ANGPTL3 variant nucleic acid molecule can be any nucleic acid molecule (such as, a genomic nucleic acid molecule, an mRNA molecule, or a cDNA molecule produced from an mRNA molecule) encoding an ANGPTL3 variant polypeptide having a partial loss-of-function, a complete loss-of-function, a predicted partial loss-of-function, or a predicted complete loss-of-function. A subject who has an ANGPTL3 polypeptide having a partial loss-of-function (or predicted partial loss-of-function) is hypomorphic for ANGPTL3. In some embodiments, the ANGPTL3 variant nucleic acid molecule results in decreased or aberrant expression or activity of ANGPTL3 mRNA or polypeptide. In some embodiments, the ANGPTL3 variant nucleic acid molecule is associated with a reduced in vitro response to ANGPTL3 ligands compared with reference ANGPTL3. In some embodiments, the ANGPTL3 variant nucleic acid molecule is a splice-site variant, a stop-gain variant, a start-loss variant, a stop-loss variant, a frameshift variant, an in-frame indel variant, or a variant that encodes a truncated ANGPTL3 variant polypeptide. In some embodiments, the ANGPTL3 variant nucleic acid molecule is a missense variant nucleic acid molecule. In some embodiments, the ANGPTL3 variant nucleic acid molecule comprises a single nucleotide polymorphism (SNP). In some embodiments, the ANGPTL3 variant nucleic acid molecule comprises a variation in a coding region. In some embodiments, the ANGPTL3 variant nucleic acid molecule results or is predicted to result in a premature truncation of an ANGPTL3 polypeptide compared to the reference ANGPTL3. In some embodiments, the ANGPTL3 variant nucleic acid molecule is a variant that is predicted to be damaging to the protein function (and hence, in this case, protective to the human) by in vitro prediction algorithms such as Polyphen, SIFT, or similar algorithms. In some embodiments, the ANGPTL3 variant nucleic acid molecule is a variant that causes or is predicted to cause a nonsynonymous amino acid substitution in an ANGPTL3 nucleic acid molecule and whose allele frequency is less than 1/100 alleles in the population from which the subject is selected. In some embodiments, the ANGPTL3 variant nucleic acid molecule is any rare missense variant (allele frequency<0.1%; or 1 in 1,000 alleles), or any splice-site, stop-gain, start-loss, stop-loss, frameshift, or in-frame indel, or other frameshift ANGPTL3 variant.

[0022] For purposes of the present disclosure, any particular subject, such as a human, can be categorized as having one of three SLC5A2 genotypes: i) SLC5A2 reference; ii) heterozygous for an SLC5A2 variant nucleic acid molecule; or iii) homozygous for an SLC5A2 variant nucleic acid molecule. A subject is SLC5A2 reference when the subject does not have a copy of an SLC5A2 variant nucleic acid molecule. A subject is heterozygous for an SLC5A2 variant nucleic acid molecule when the subject has a single copy of an SLC5A2 variant nucleic acid molecule.

[0023] In some embodiments, the subject is heterozygous for one of the ANGPTL3 variant nucleic acid molecule and the SLC5A2 variant nucleic acid molecule and reference for the other of the ANGPTL3 variant nucleic acid molecule and the SLC5A2 variant nucleic acid molecule.

[0024] In any of the embodiments described herein, the SLC5A2 variant nucleic acid molecule can be any nucleic acid molecule (such as, a genomic nucleic acid molecule, an mRNA molecule, or a cDNA molecule produced from an mRNA molecule) encoding an SLC5A2 variant polypeptide having a partial loss-of-function, a complete loss-of-function, a predicted partial loss-of-function, or a predicted complete loss-of-function. A subject who has an SLC5A2 polypeptide having a partial loss-of-function (or predicted partial loss-of-function) is hypomorphic for SLC5A2. In some embodiments, the SLC5A2 variant nucleic acid molecule results in decreased or aberrant expression or activity of SLC5A2 mRNA or polypeptide. In some embodiments, the SLC5A2 variant nucleic acid molecule is associated with a reduced in vitro response to SLC5A2 ligands compared with reference SLC5A2. In some embodiments, the SLC5A2 variant nucleic acid molecule is a splice-site variant, a stop-gain variant, a start-loss variant, a stop-loss variant, a frameshift variant, an in-frame indel variant, or a variant that encodes a truncated SLC5A2 variant polypeptide. In some embodiments, the SLC5A2 variant nucleic acid molecule is a missense variant nucleic acid molecule. In some embodiments, the SLC5A2 variant nucleic acid molecule comprises a single nucleotide polymorphism (SNP). In some embodiments, the SLC5A2 variant nucleic acid molecule comprises a variation in a coding region. In some embodiments, the SLC5A2 variant nucleic acid molecule results or is predicted to result in a premature truncation of an SLC5A2 polypeptide compared to the reference SLC5A2. In some embodiments, the SLC5A2 variant nucleic acid molecule is a variant that is predicted to be damaging to the protein function (and hence, in this case, protective to the human) by in vitro prediction algorithms such as Polyphen, SIFT, or similar algorithms. In some embodiments, the SLC5A2 variant nucleic acid molecule is a variant that causes or is predicted to cause a nonsynonymous amino acid substitution in an SLC5A2 nucleic acid molecule and whose allele frequency is less than 1/100 alleles in the population from which the subject is selected. In some embodiments, the SLC5A2 variant nucleic acid molecule is any rare missense variant (allele frequency<0.1%; or 1 in 1,000 alleles), or any splice-site, stop-gain, start-loss, stop-loss, frameshift, or in-frame indel, or other frameshift SLC5A2 variant.

[0025] For subjects that are genotyped or determined to be ANGPTL3 reference and SLC5A2 reference, such subjects have an increased risk of developing a kidney disease. For subjects that are genotyped or determined to be: i) either ANGPTL3 reference or heterozygous for an ANGPTL3 variant nucleic acid molecule, and ii) either SLC5A2 reference or heterozygous for an SLC5A2 variant nucleic acid molecule, such subjects can be treated with an ANGPTL3 inhibitor and an SLC5A2 inhibitor.

[0026] In any of the embodiments described herein, the subject in whom a kidney disease is prevented by administering the ANGPTL3 inhibitor and SLC5A2 inhibitor can be anyone at risk for developing a kidney disease including, but not limited to, subjects with a genetic predisposition for developing a kidney disease. Additional risk factors include, but are not limited to, diabetes, hypertension, obesity, excessive salt intake, age, smoking, excessive alcohol consumption, heavy metal exposure, hyperlipidemia, and the presence of autoimmune diseases. In addition, in some embodiments, any subject can be at risk of developing a kidney disease. In some embodiments, administering an ANGPTL3 inhibitor and an SLC5A2 inhibitor can be carried out to prevent development of an additional kidney disease in a subject who has already had a kidney disease.

[0027] In any of the embodiments described herein, the ANGPTL3 polypeptide can be any ANGPTL3 polypeptide having a partial loss-of-function, a complete loss-of-function, a predicted partial loss-of-function, or a predicted complete loss-of-function. In any of the embodiments described herein, the SLC5A2 polypeptide can be any SLC5A2 polypeptide having a partial loss-of-function, a complete loss-of-function, a predicted partial loss-of-function, or a predicted complete loss-of-function.

[0028] In any of the embodiments described herein, the ANGPTL3 variant nucleic acid molecule (such as genomic nucleic acid molecules, mRNA molecules produced therefrom, or cDNA molecules produced from the mRNA molecules) can include variations at positions 62,597,520-62,606,313 of chromosome 1 using the nucleotide sequence of the ANGPTL3 reference genomic nucleic acid molecule (see, ENST00000371129.4 annotated in the in the Ensembl database (URL: world wide web at “useast.ensembl.org/Homo_sapiens/Transcript/Summary?db=core;g=ENSG00000132855;r=1:62597520-62606313;t=ENST00000371129”)) as a reference sequence. The sequence provided in ENST00000371129.4 for the ANGPTL3 genomic nucleic acid molecule is only an exemplary sequence. Other sequences for the ANGPTL3 genomic nucleic acid molecule are also possible. Exemplary ANGPTL3 variant nucleic acid molecules include, but are not limited to those recited in Table 6.

[0029] In any of the embodiments described herein, the SLC5A2 variant nucleic acid molecule (such as genomic nucleic acid molecules, mRNA molecules produced therefrom, or cDNA molecules produced from the mRNA molecules) can include variations at positions 31,483,123-31,490,769 of chromosome 16 using the nucleotide sequence of the SLC5A2 reference genomic nucleic acid molecule (see, ENST00000330498.4 annotated in the in the Ensembl database (URL: world wide web at “useast.ensembl.org/Homo_sapiens/Gene/Summary?g=ENSG00000140675;r=16:31483002-31490860;transcript=ENST00000330498.4”)) as a reference sequence. The sequence provided in ENST00000330498.4 for the SLC5A2 genomic nucleic acid molecule is only an exemplary sequence. Other sequences for the SLC5A2 genomic nucleic acid molecule are also possible. Exemplary SLC5A2 variant nucleic acid molecules include, but are not limited to those recited in 6.

[0030] Any one or more (i.e., any combination) of the ANGPTL3 variant nucleic acid molecules and SLC5A2 variant nucleic acid molecules described herein can be used within any of the methods described herein to determine whether a subject has an increased or decreased risk of developing a kidney disease. The combinations of particular variants can form a mask used for statistical analysis of the particular correlation of ANGPTL3 and SLC5A2 and an increased or decreased risk of developing a kidney disease. In some embodiments, the mask used for statistical analysis of the particular correlation of ANGPTL3 and SLC5A2 and an increased or decreased risk of developing a kidney disease can exclude any one or more of these ANGPTL3 variant nucleic acid molecules and/or SLC5A2 variant nucleic acid molecules described herein.

[0031] In any of the embodiments described herein, the subject can have a kidney disease. In any of the embodiments described herein, the subject can be at risk of developing a kidney disease. In any of the embodiments described herein, the kidney disease is chronic kidney disease, diabetic kidney disease, a kidney stone, chronic glomerulonephritis, nephronophthisis, chronic interstitial nephritis, and/or nephrosclerosis. In some embodiments, the kidney disease is chronic kidney disease. In some embodiments, the kidney disease is diabetic kidney disease. In some embodiments, the kidney disease is a kidney stone. In some embodiments, the kidney disease is chronic glomerulonephritis. In some embodiments, the kidney disease is nephronophthisis. In some embodiments, the kidney disease is chronic interstitial nephritis. In some embodiments, the kidney disease is nephrosclerosis.

[0032] Other kidney disease include, but are not limited to, acquired cystic disease, acute (postinfectious) glomerulonephritis, acute infectious interstitial nephritis, acute interstitial nephritis, acute pyelonephritis, acute renal failure, acute transplant failure, acute tubular necrosis, adult polycystic kidney disease, AL amyloid, analgesic nephrosis, ANCA-associated vasculitis, anti-glomerular basement membrane disease (Goodpasture's Syndrome), antibody-mediated kidney graft rejection, asymptomatic hematuria, asymptomatic proteinuria, atypical hemolytic uremic syndrome, autosomal dominant polycystic kidney disease, autosomal recessive polycystic kidney disease, BK virus-associated nephropathy, Bence Jones cast nephrosis, benign familial hematuria, benign nephrosclerosis and atheromatous embolization, bilateral cortical necrosis, C3 glomerulonephritis, cardiac surgery associated acute kidney injury, chronic allograft nephropathy, chronic glomerulonephritis, chronic interstitial nephritis, chronic pyelonephritis, chronic renal failure, chronic transplant failure, circulating immune complex nephritis, contrast-induced nephropathy, crescentic glomerulonephritis, cryoglobulinemia, cystic renal dysplasia, delayed graft function, dense deposit disease, diabetic glomerulosclerosis, diabetic nephropathy, dialysis cystic disease, drug induced (allergic) acute interstitial nephritis, ectopic kidney, eosinophilic granulomatosis with polyangiitis, Fabry's disease, familial juvenile nephronophthisis-medullary cystic disease complex, focal segmental glomerulosclerosis (segmental hyalinosis), glomerulocystic disease, glomerulonephritis, glomerulonephritis associated with bacterial endocarditis, glomerulosclerosis, granulomatosis with polyangiitis, hemolytic-uremic syndrome, Henoch-Schonlein purpura, hepatitis-associated glomerulonephritis, hereditary nephritis (Alport syndrome), Human Immunodeficiency Virus-associated nephropathy, horseshoe kidney, hydronephrosis, hyperoxaluria, hypertensive nephropathy, IgA nephropathy, infantile polycystic kidney disease, ischemic acute tubular necrosis, light-chain deposit disease, lupus nephritis, malignant nephrosclerosis, medullary cystic disease, membranoproliferative (mesangiocapillary) glomerulonephritis, membranous glomerulonephritis, membranous nephropathy, mesangial proliferative glomerulonephritis (includes Berger's Disease), microscopic polyangiitis, minimal change glomerular disease, nephritic syndrome, nephroblastoma (Wilms tumor), nephronophthisis (medullary cystic disease complex), pigment nephropathy, plasma cell dyscrasias (monoclonal immunoglobulin-induced renal damage), polyarteritis nodosa, polycystic kidney disease, proteinuria, pyelonephritis, rapidly progressive (crescentic) glomerulonephritis, renal agenesis, renal amyloidosis, renal cell carcinoma, renal dysgenesis, renal dysplasia, renal hypoplasia, renal infection, renal osteodystrophy, renal stones (urolithiasis), renal tubular acidosis, renal vasculitis, renovascular hypertension, scleroderma (progressive systemic sclerosis), secondary acquired glomerulonephritis, sepsis-associated acute kidney injury, simple renal cysts, systemic lupus erythematosus, T-cell-mediated kidney graft rejection, thin basement membrane nephropathy, thrombotic microangiopathy, thrombotic thrombocytopenic purpura, toxic acute tubular necrosis, tubular defects, tubulointerstitial disease in multiple myeloma, urate nephropathy, urinary obstruction, and vasculitis.

[0033] Symptoms of chronic kidney disease include, but are not limited to, nausea, vomiting, loss of appetite, fatigue and weakness, sleep problems, changes urination volume, decreased mental sharpness, muscle twitches and cramps, swelling of feet and ankles, persistent itching, chest pain, fluid build-up around the lining of the heart, shortness of breath, fluid build-up in the lungs, and high blood pressure (hypertension) that's difficult to control.

[0034] Symptoms of a kidney stone include, but are not limited to, severe, sharp pain in the side and back, below the ribs, pain that radiates to the lower abdomen and groin, pain that comes in waves and fluctuates in intensity, pain or burning sensation while urinating, pink, red or brown urine, cloudy or foul-smelling urine, a persistent need to urinate, urinating more often than usual or urinating in small amounts, nausea and vomiting, and fever and chills if an infection is present.

[0035] Symptoms of chronic glomerulonephritis include, but are not limited to, pink or cola-colored urine from red blood cells in your urine (hematuria), foamy urine due to excess protein (proteinuria), high blood pressure (hypertension), and fluid retention (edema) with swelling evident in the face, hands, feet, and abdomen.

[0036] Symptoms of nephronophthisis include, but are not limited to, increased urine production (polyuria), excessive thirst (polydipsia), general weakness, and extreme tiredness (fatigue).

[0037] Symptoms of chronic interstitial nephritis include, but are not limited to, blood in the urine, fever, increased or decreased urine output, mental status changes (drowsiness, confusion, coma), nausea, vomiting, rash, swelling of any area of body, and weight gain (from retaining fluid).

[0038] Symptoms of nephrosclerosis include, but are not limited to, impaired vision, blood in the urine, loss of weight, and the accumulation of urea and other nitrogenous waste products in the blood, a condition known as uremia.

[0039] The present disclosure provides methods of treating a subject having a kidney disease or at risk of developing a kidney disease, the method comprising administering an ANGPTL3 inhibitor and an SLC5A2 inhibitor to the subject. In some embodiments, the kidney disease is chronic kidney disease. In some embodiments, the kidney disease is diabetic kidney disease. In some embodiments, the kidney disease is a kidney stone. In some embodiments, the kidney disease is chronic glomerulonephritis. In some embodiments, the kidney disease is nephronophthisis. In some embodiments, the kidney disease is chronic interstitial nephritis. In some embodiments, the kidney disease is nephrosclerosis.

[0040] In some embodiments, the ANGPTL3 inhibitor comprises an inhibitory nucleic acid molecule. Examples of inhibitory nucleic acid molecules include, but are not limited to, antisense nucleic acid molecules, small interfering RNAs (siRNAs), and short hairpin RNAs (shRNAs). Such inhibitory nucleic acid molecules can be designed to target any region of an ANGPTL3 nucleic acid molecule. In some embodiments, the antisense RNA, siRNA, or shRNA hybridizes to a sequence within an ANGPTL3 genomic nucleic acid molecule or mRNA molecule and decreases expression of the ANGPTL3 polypeptide in a cell in the subject. In some embodiments, the ANGPTL3 inhibitor comprises an antisense molecule that hybridizes to an ANGPTL3 genomic nucleic acid molecule or mRNA molecule and decreases expression of the ANGPTL3 polypeptide in a cell in the subject. In some embodiments, the ANGPTL3 inhibitor comprises an siRNA that hybridizes to an ANGPTL3 genomic nucleic acid molecule or mRNA molecule and decreases expression of the ANGPTL3 polypeptide in a cell in the subject. In some embodiments, the ANGPTL3 inhibitor comprises an shRNA that hybridizes to an ANGPTL3 genomic nucleic acid molecule or mRNA molecule and decreases expression of the ANGPTL3 polypeptide in a cell in the subject.

[0041] In some embodiments, the ANGPTL3 antisense nucleic acid molecules comprise or consist of any of the nucleotide sequences represented by SEQ ID NOs: 1-325. In some embodiments, the ANGPTL3 siRNA molecules comprise or consist of any of the nucleotide sequences (sense and antisense strands presented one after the other) represented by SEQ ID NOs: 326-1189 (e.g., the sense strand is, for example, SEQ ID NO:326 and the corresponding antisense strand is SEQ ID NO:327; the sense strand is, for example, SEQ ID NO:1188 and the corresponding antisense strand is SEQ ID NO:1189; etc.).

[0042] In some embodiments, the siRNA molecules comprise or consist of the nucleotide sequences (sense and antisense strands) recited in U.S. Pat. No. 10,995,335 and PCT Publication No. WO 2019/055633, which are incorporated herein by reference in their entirety.

[0043] In some embodiments, the siRNA molecules comprise or consist of the nucleotide sequences (sense and antisense strands) recited in U.S. Pat. No. 10,875,884 and PCT Publication Nos. WO 2015/168589, WO 2015/100394, and WO 2011/085271, which are incorporated herein by reference in their entirety.

[0044] In some embodiments, the siRNA molecules comprise or consist of the nucleotide sequences (sense and antisense strands) recited in U.S. Pat. Nos. 10,570,393 and 10,337,010, and PCT Publication Nos. WO 2016/168286 and WO 2012/177784, which are incorporated herein by reference in their entirety.

[0045] In some embodiments, the ANGPTL3 inhibitor comprises a nuclease agent that induces one or more nicks or double-strand breaks at a recognition sequence(s) or a DNA-binding protein that binds to a recognition sequence within an ANGPTL3 genomic nucleic acid molecule. The recognition sequence can be located within a coding region of the ANGPTL3 gene, or within regulatory regions that influence the expression of the gene. A recognition sequence of the DNA-binding protein or nuclease agent can be located in an intron, an exon, a promoter, an enhancer, a regulatory region, or any non-protein coding region. The recognition sequence can include or be proximate to the start codon of the ANGPTL3 gene. For example, the recognition sequence can be located about 10, about 20, about 30, about 40, about 50, about 100, about 200, about 300, about 400, about 500, or about 1,000 nucleotides from the start codon. As another example, two or more nuclease agents can be used, each targeting a nuclease recognition sequence including or proximate to the start codon. As another example, two nuclease agents can be used, one targeting a nuclease recognition sequence including or proximate to the start codon, and one targeting a nuclease recognition sequence including or proximate to the stop codon, wherein cleavage by the nuclease agents can result in deletion of the coding region between the two nuclease recognition sequences. Any nuclease agent that induces a nick or double-strand break into a desired recognition sequence can be used in the methods and compositions disclosed herein. Any DNA-binding protein that binds to a desired recognition sequence can be used in the methods and compositions disclosed herein.

[0046] Suitable nuclease agents and DNA-binding proteins for use herein include, but are not limited to, zinc finger protein or zinc finger nuclease (ZFN) pair, Transcription Activator-Like Effector (TALE) protein or Transcription Activator-Like Effector Nuclease (TALEN), or Clustered Regularly Interspersed Short Palindromic Repeats (CRISPR)/CRISPR-associated (Cas) systems. The length of the recognition sequence can vary, and includes, for example, recognition sequences that are about 30-36 bp for a zinc finger protein or ZFN pair, about 15-18 bp for each ZFN, about 36 bp for a TALE protein or TALEN, and about 20 bp for a CRISPR/Cas guide RNA.

[0047] In some embodiments, CRISPR/Cas systems can be used to modify an ANGPTL3 genomic nucleic acid molecule within a cell. The methods and compositions disclosed herein can employ CRISPR-Cas systems by utilizing CRISPR complexes (comprising a guide RNA (gRNA) complexed with a Cas protein) for site-directed cleavage of ANGPTL3 nucleic acid molecules.

[0048] Cas proteins generally comprise at least one RNA recognition or binding domain that can interact with gRNAs. Cas proteins can also comprise nuclease domains (such as, for example, DNase or RNase domains), DNA binding domains, helicase domains, protein-protein interaction domains, dimerization domains, and other domains. Suitable Cas proteins include, for example, a wild type Cas9 protein and a wild type Cpf1 protein (such as, for example, FnCpf1). A Cas protein can have full cleavage activity to create a double-strand break in an ANGPTL3 genomic nucleic acid molecule or it can be a nickase that creates a single-strand break in an ANGPTL3 genomic nucleic acid molecule. Additional examples of Cas proteins include, but are not limited to, Cas1, Cas1B, Cas2, Cas3, Cas4, Cas5, Cas5e (CasD), Cas6, Cas6e, Cas6f, Cas7, Cas8a1, Cas8a2, Cas8b, Cas8c, Cas9 (Csn1 or Csx12), Cas10, Cas10d, CasF, CasG, CasH, Csy1, Csy2, Csy3, Cse1 (CasA), Cse2 (CasB), Cse3 (CasE), Cse4 (CasC), Csc1, Csc2, Csa5, Csn2, Csm2, Csm3, Csm4, Csm5, Csm6, Cmr1, Cmr3, Cmr4, Cmr5, Cmr6, Csb1, Csb2, Csb3, Csx17, Csx14, Csx10, Csx16, CsaX, Csx3, Csx1, Csx15, Csf1, Csf2, Csf3, Csf4, and Cu1966, and homologs or modified versions thereof. In some embodiments, a Cas system, such as Cas12a, can have multiple gRNAs encoded into a single crRNA. Cas proteins can also be operably linked to heterologous polypeptides as fusion proteins. For example, a Cas protein can be joined or fused to a cleavage domain, an epigenetic modification domain, a transcriptional activation domain, or a transcriptional repressor domain. Cas proteins can be provided in any form. For example, a Cas protein can be provided in the form of a protein, such as a Cas protein complexed with a gRNA. Alternately, a Cas protein can be provided in the form of a nucleic acid molecule encoding the Cas protein, such as an RNA or DNA.

[0049] In some embodiments, targeted genetic modifications of ANGPTL3 genomic nucleic acid molecules can be generated by contacting a cell with a Cas protein and one or more gRNAs that hybridize to one or more gRNA recognition sequences within a target genomic locus in the ANGPTL3 genomic nucleic acid molecule. The gRNA recognition sequence can include or be proximate to the start codon of an ANGPTL3 genomic nucleic acid molecule or the stop codon of an ANGPTL3 genomic nucleic acid molecule. For example, the gRNA recognition sequence can be located from about 10, from about 20, from about 30, from about 40, from about 50, from about 100, from about 200, from about 300, from about 400, from about 500, or from about 1,000 nucleotides of the start codon or the stop codon.

[0050] The gRNA recognition sequences within a target genomic locus in an ANGPTL3 genomic nucleic acid molecule are located near a Protospacer Adjacent Motif (PAM) sequence, which is a 2-6 base pair DNA sequence immediately following the DNA sequence targeted by the Cas9 nuclease. The canonical PAM is the sequence 5′-NGG-3′ where “N” is any nucleobase followed by two guanine (“G”) nucleobases. gRNAs can transport Cas9 to anywhere in the genome for gene editing, but no editing can occur at any site other than one at which Cas9 recognizes PAM. In addition, 5′-NGA-3′ can be a highly efficient non-canonical PAM for human cells. Generally, the PAM is about 2-6 nucleotides downstream of the DNA sequence targeted by the gRNA. The PAM can flank the gRNA recognition sequence. In some embodiments, the gRNA recognition sequence can be flanked on the 3′ end by the PAM. In some embodiments, the gRNA recognition sequence can be flanked on the 5′ end by the PAM. For example, the cleavage site of Cas proteins can be about 1 to about 10, about 2 to about 5 base pairs, or three base pairs upstream or downstream of the PAM sequence. In some embodiments (such as when Cas9 from S. pyogenes or a closely related Cas9 is used), the PAM sequence of the non-complementary strand can be 5′-NGG-3′, where N is any DNA nucleotide and is immediately 3′ of the gRNA recognition sequence of the non-complementary strand of the target DNA. As such, the PAM sequence of the complementary strand would be 5′-CCN-3′, where N is any DNA nucleotide and is immediately 5′ of the gRNA recognition sequence of the complementary strand of the target DNA.

[0051] A gRNA is an RNA molecule that binds to a Cas protein and targets the Cas protein to a specific location within an ANGPTL3 genomic nucleic acid molecule. An exemplary gRNA is a gRNA effective to direct a Cas enzyme to bind to or cleave an ANGPTL3 genomic nucleic acid molecule, wherein the gRNA comprises a DNA-targeting segment that hybridizes to a gRNA recognition sequence within the ANGPTL3 genomic nucleic acid molecule. Exemplary gRNAs comprise a DNA-targeting segment that hybridizes to a gRNA recognition sequence present within an ANGPTL3 genomic nucleic acid molecule that includes or is proximate to the start codon or the stop codon. For example, a gRNA can be selected such that it hybridizes to a gRNA recognition sequence that is located from about 5, from about 10, from about 15, from about 20, from about 25, from about 30, from about 35, from about 40, from about 45, from about 50, from about 100, from about 200, from about 300, from about 400, from about 500, or from about 1,000 nucleotides of the start codon or located from about 5, from about 10, from about 15, from about 20, from about 25, from about 30, from about 35, from about 40, from about 45, from about 50, from about 100, from about 200, from about 300, from about 400, from about 500, or from about 1,000 nucleotides of the stop codon. Suitable gRNAs can comprise from about 17 to about 25 nucleotides, from about 17 to about 23 nucleotides, from about 18 to about 22 nucleotides, or from about 19 to about 21 nucleotides. In some embodiments, the gRNAs can comprise 20 nucleotides.

[0052] The Cas protein and the gRNA form a complex, and the Cas protein cleaves the target ANGPTL3 genomic nucleic acid molecule. The Cas protein can cleave the nucleic acid molecule at a site within or outside of the nucleic acid sequence present in the target ANGPTL3 genomic nucleic acid molecule to which the DNA-targeting segment of a gRNA will bind. For example, formation of a CRISPR complex (comprising a gRNA hybridized to a gRNA recognition sequence and complexed with a Cas protein) can result in cleavage of one or both strands in or near (such as, for example, within 1, 2, 3, 4, 5, 6, 7, 8, 9, 10, 20, 50, or more base pairs from) the nucleic acid sequence present in the ANGPTL3 genomic nucleic acid molecule to which a DNA-targeting segment of a gRNA will bind.

[0053] Such methods can result, for example, in an ANGPTL3 genomic nucleic acid molecule in which a region of the ANGPTL3 genomic nucleic acid molecule is disrupted, the start codon is disrupted, the stop codon is disrupted, or the coding sequence is disrupted or deleted. Optionally, the cell can be further contacted with one or more additional gRNAs that hybridize to additional gRNA recognition sequences within the target genomic locus in the ANGPTL3 genomic nucleic acid molecule. By contacting the cell with one or more additional gRNAs (such as, for example, a second gRNA that hybridizes to a second gRNA recognition sequence), cleavage by the Cas protein can create two or more double-strand breaks or two or more single-strand breaks.

[0054] In some embodiments, the ANGPTL3 inhibitor is a small molecule. In some embodiments, the ANGPTL3 inhibitor is (12mer-)heparin (Gunn et al., J. Biol. Chem., 2021, 296, 1-12) or CAT-2003 (Liu et al., Arteriosclerosis, Thrombosis, and Vascular Biology, 2014, 34, A237). In some embodiments, the ANGPTL3 inhibitor is a vaccine. In some embodiments, the vaccine comprises a peptide corresponding to the LPL inhibitory domain of ANGPTL3. In some embodiments, the vaccine comprises a peptide having an amino acid sequence comprising amino acids 32 to 41 of ANGPTL3 (i.e., EPKSRFAMLD; SEQ ID NO:3738) (see, Fukami et al., Cell Reports Med., 2021, 100446).

[0055] In some embodiments, the ANGPTL3 inhibitor is an antibody, or antigen-binding fragment thereof. In some embodiments, the antibody, or antigen-binding fragment thereof, binds specifically to human ANGPTL3. Exemplary antibodies, and fragments thereof, are disclosed in PCT Publication WO 2020/243031, which is incorporated herein by reference in its entirety.

[0056] In some embodiments, the antibody is a fully human monoclonal antibody (mAb), or antigen-binding fragment thereof, that specifically binds and neutralizes, inhibits, blocks, abrogates, reduces, or interferes with, at least one activity of ANGTPL3, in particular, human ANGPTL3 (SEQ ID NO:3739). The activity of ANGPTL3 that can be neutralized, inhibited, blocked, abrogated, reduced or interfered with, by the antibodies or fragments thereof of the present disclosure, includes, but is not limited to, inhibition of LPL activity, induction of angiogenesis, and the like. In some embodiments, an antibody or fragment thereof can neutralize, inhibit, block, abrogate, reduce, or interfere with, an activity of ANGPTL3 by binding to an epitope of ANGPTL3 that is directly involved in the targeted activity of ANGPTL3. In some embodiments, an antibody or fragment thereof can neutralize, inhibit, block, abrogate, reduce, or interfere with, an activity of ANGPTL3 by binding to an epitope of ANGPTL3 that is not directly involved in the targeted activity of ANGPTL3, but the antibody or fragment binding thereto sterically or conformationally inhibits, blocks, abrogates, reduces, or interferes with, the targeted activity of ANGPTL3. In some embodiments, an antibody or fragment thereof binds to an epitope of ANGPTL3 that is not directly involved in the targeted activity (e.g., inhibiting LPL activity, inducing angiogenesis, and the like) of ANGPTL3 (i.e., a non-blocking antibody), but the antibody or fragment binding thereto results in the enhancement of the clearance of ANGPTL3 from the circulation, compared to the clearance of ANGPTL3 in the absence of the antibody or fragment thereof, thereby indirectly inhibiting, blocking, abrogating, reducing, or interfering with, an activity of ANGPTL3. Clearance of ANGPTL3 from the circulation can be particularly enhanced by combining two or more different non-blocking antibodies that do not compete with one another for specific binding to ANGPTL3.

[0057] The antibodies (Abs) can be full-length (for example, an IgGl or IgG4 antibody) or may comprise only an antigen-binding portion (for example, a Fab, F(ab′)₂ or scFv fragment), and may be modified to affect functionality, e.g., to eliminate residual effector functions (Reddy et al., J. Immunol., 2000, 164, 1925-1933).

[0058] In some embodiments, the antibody or antigen-binding fragment of an antibody comprises a heavy chain variable region (HCVR) selected from the group consisting of SEQ ID NO:3740, 3741, 3742, 3743, 3744, 3745, 3746, 3747, 3748, 3749, and 3750, or a substantially similar sequence thereof having at least 90%, at least 95%, at least 98% or at least 99% sequence identity. In some embodiments, the antibody or antigen-binding fragment thereof comprises a HCVR having an amino acid sequence selected from the group consisting of SEQ ID NO:3740, 3741, 3742, 3744, 3745, 3747, and 3750. In some embodiments, the antibody or an antigen-binding fragment thereof comprises a HCVR having an amino acid sequence of SEQ ID NO:3744.

[0059] In some embodiments, an antibody or antigen-binding fragment of an antibody comprises a light chain variable region (LCVR) selected from the group consisting of SEQ ID NO:3751, 3752, 3753, 3754, 3755, 3756, 3757, 3758, 3759, 3760, and 3761, or a substantially similar sequence thereof having at least 90%, at least 95%, at least 98% or at least 99% sequence identity. In another embodiment, the antibody or antigen-binding portion of an antibody comprises a LCVR having an amino acid sequence selected from the group consisting of SEQ ID NO:3751, 3752, 3753, 3755, 3756, 3758, and 3761. In some embodiments, the antibody or antigen-binding portion of an antibody comprises a LCVR having an amino acid sequence of SEQ ID NO:3755.

[0060] In some embodiments, the antibody or fragment thereof comprises a HCVR and LCVR sequence pair (HCVR/LCVR) selected from the group consisting of SEQ ID NO:3740/3751, 3741/3752, 3742/3753, 3743/3754, 3744/3755, 3745/3756, 3746/3757, 3747/3758, 3748/3759, 3749/3760, and 3750/3761. In some embodiments, the antibody or fragment thereof comprises a HCVR and LCVR sequence pair selected from the group consisting of SEQ ID NO:3740/3751, 3741/3752, 3742/3753, 3744/3755, 3745/3756, 3747/3758, and 3750/3761. In some embodiments, the antibody or fragment thereof comprises a HCVR and LCVR sequence pair of SEQ ID NO:3744/3755.

[0061] In some embodiments, the antibody or antigen-binding fragment thereof comprises a heavy chain complementarity determining region 3 (HCDR3) amino acid sequence selected from the group consisting of SEQ ID NO:3762, 3763, 3764, 3765, 3766, 3767, 3768, 3769, 3770, 3771, and 3772, or a substantially similar sequence thereof having at least 90%, at least 95%, at least 98% or at least 99% sequence identity; and a light chain CDR3 (LCDR3) amino acid sequence selected from the group consisting of SEQ ID NO:3773, 3774, 3775, 3776, 3777, 3778, 3779, 3780, 3781, 3782, and 3783, or substantially similar sequences thereof having at least 90%, at least 95%, at least 98% or at least 99% sequence identity. In some embodiments, the antibody or fragment thereof comprises a HCDR3/LCDR3 amino acid sequence pair comprising SEQ ID NO:3762/3773, 3763/3774, 3764/3775, 3765/3776, 3766/3777, 3767/3778, 3768/3779, 3769/3780, 3770/3781, 3771/3782, or 3772/3783. In some embodiments, the antibody or fragment thereof comprises a HCDR3/LCDR3 amino acid sequence pair comprising SEQ ID NO:3762/3773, 3763/3774, 3764/3775, 3766/3777, 3767/3778, 3769/3780, or 3772/3783. In some embodiments, the antibody or fragment thereof comprises a HCDR3/LCDR3 amino acid sequence pair comprising SEQ ID NO:3766/3777.

[0062] In some embodiments, the antibody or fragment thereof further comprises a heavy chain CDR1 (HCDR1) amino acid sequence selected from the group consisting of SEQ ID NO:3784, 3785, 3786, 3787, 3788, 3789, 3790, 3791, 3792, 3793, and 3794, or a substantially similar sequence thereof having at least 90%, at least 95%, at least 98% or at least 99% sequence identity; and a heavy chain CDR2 (HCDR2) amino acid sequence selected from the group consisting of SEQ ID NO:3795, 3796, 3797, 3798, 3799, 3800, 3801, 3802, 3803, 3804, and 3805, or a substantially similar sequence thereof having at least 90%, at least 95%, at least 98% or at least 99% sequence identity; and optionally further comprises a light chain CDR1 (LCDR1) amino acid sequence selected from the group consisting of SEQ ID NO:3806, 3807, 3808, 3809, 3810, 3811, 3812, 3813, 3814, 3815, and 3816, or a substantially similar sequence thereof having at least 90%, at least 95%, at least 98% or at least 99% sequence identity; and/or a light chain CDR2 (LCDR2) amino acid sequence selected from the group consisting of SEQ ID NO:3817 (AAS), 3818 (KAS), 3819 (AAS), 3820 (KAS), 3821 (KAS), 3822 (TTS), 3823 (PAS), 3824 (TAS), 3825 (KVS), 3826 (VAA), and 3827, or a substantially similar sequence thereof having at least 90%, at least 95%, at least 98% or at least 99% sequence identity.

[0063] In some embodiments, the antibody or antigen-binding fragment thereof comprises a HCDR1/HCDR2/HCDR3 combination selected from the group consisting of SEQ ID NO:3784/3795/3762, 3785/3796/3763, 3786/3797/3764, 3787/3798/3765, 3788/3799/3766, 3789/3800/3767, 3790/3801/3768, 3791/3802/3769, 3792/3803/3770, 3793/3804/3771, and 3794/3805/3772; and/or a LCDR1/LCDR2/LCDR3 combination selected from the group consisting of SEQ ID NO:3806/3817/3773, 3807/3818/3774, 3808/3819/3775, 3809/3820/3776, 3810/3821/3777, 3811/3822/3778, 3812/3823/3779, 3813/3824/3780, 3814/3825/3781, 3815/3826/3782, and 3816/3827/3783. In some embodiments, the heavy and light chain CDR amino acid sequences comprise a CDR sequence combination selected from the group consisting of SEQ ID NO:3784/3795/3762/3806/3817/3773, 3785/3796/3763/3807/3818/3774, 3786/3797/3764/3808/3819/3775, 3787/3798/3765/3809/3820/3776, 3788/3799/3766/3810/3821/3777, 3789/3800/3767/3811/3822/3778, 3790/3801/3768/3812/3823/3779, 3791/3802/3769/3813/3824/3780, 3792/3803/3770/3814/3825/3781, 3793/3804/3771/3815/3826/3782 and 3794/3805/3772/3816/3827/3783. In some embodiments, the heavy and light chain CDR amino acid sequences comprise a CDR sequence combination of SEQ ID NO: 3784/3795/3762/3806/3817/3773, 3785/3796/3763/3807/3818/3774, 3786/3797/3764/3808/3819/3775, 3788/3799/3766/3810/3821/3777, 3789/3800/3767/3811/3822/3778, 3791/3802/3769/3813/3824/3780 or 3794/3805/3772/3816/3827/3783. In some embodiments, the heavy and light chain CDR amino acid sequences comprise a CDR sequence combination of SEQ ID NO:3788/3799/3766/3810/3821/3777.

[0064] In some embodiments, the antibody or antigen-binding fragment thereof, which specifically binds ANGPTL3, comprises heavy and light chain CDR domains contained within HCVR/LCVR pairs selected from the group consisting of SEQ ID NO:3740/3751, 3741/3752, 3742/3753, 3743/3754, 3744/3755, 3745/3756, 3746/3757, 3747/3758, 3748/3759, 3749/3760, and 3750/3761. Methods and techniques for identifying CDRs within HCVR and LCVR amino acid sequences are known in the art and can be applied to identify CDRs within the specified HCVR and/or LCVR amino acid sequences disclosed herein. Conventional definitions that can be applied to identify the boundaries of CDRs include the Kabat definition, the Chothia definition, and the AbM definition. In general terms, the Kabat definition is based on sequence variability, the Chothia definition is based on the location of the structural loop regions, and the AbM definition is a compromise between the Kabat and Chothia approaches. See, e.g., Kabat, “Sequences of Proteins of Immunological Interest,” National Institutes of Health, Bethesda, Md. (1991); Al-Lazikani et al., J. Mol. Biol., 1997, 273, 927-948; and Martin et al., Proc. Natl. Acad. Sci. USA, 1989, 86, 9268-9272. Public databases are also available for identifying CDR sequences within an antibody. In some embodiments, the antibody or fragment thereof comprises CDR sequences contained within a HCVR and LCVR pair of SEQ ID NO:3740/3751, 3741/3752, 3742/3753, 3744/3755, 3745/3756, 3747/3758, or 3750/3761. In some embodiments, the antibody or fragment thereof comprises CDR sequences contained within a HCVR and LCVR pair of SEQ ID NO:3744/3755.

[0065] In some embodiments, the antibody or antigen-binding fragment thereof competes for specific binding to ANGPTL3 with an antibody or antigen-binding fragment comprising heavy and light chain CDR sequences contained in a HCVR/LCVR sequence pair of SEQ ID NO:3740/3751, 3741/3752, 3742/3753, 3743/3754, 3744/3755, 3745/3756, 3746/3757, 3747/3758, 3748/3759, 3749/3760, or 3750/3761. In some embodiments, the antibody or antigen-binding fragment thereof competes for specific binding to ANGPTL3 with an antibody or fragment thereof comprising a HCVR/LCVR sequence pair of SEQ ID NO:3744/3755. In some embodiments, the antibody or antigen-binding fragment thereof competes for specific binding to ANGPTL3 with an antibody or fragment thereof comprising a heavy and light chain CDR sequence combination selected from the group consisting of 3784/3795/3762/3806/3817/3773, 3785/3796/3763/3807/3818/3774, 3786/3797/3764/3808/3819/3775, 3787/3798/3765/3809/3820/3776, 3788/3799/3766/3810/3821/3777, 3789/3800/3767/3811/3822/3778, 3790/3801/3768/3812/3823/3779, 3791/3802/3769/3813/3824/3780, 3792/3803/3770/3814/3825/3781, 3793/3804/3771/3815/3826/3782 and 3794/3805/3772/3816/3827/3783. In some embodiments, the antibody or antigen-binding fragment thereof competes for specific binding to ANGPTL3 with an antibody or fragment thereof comprising a heavy and light chain CDR sequence combination of SEQ ID NOS:3788/3799/3766/3810/3821/3777.

[0066] In some embodiments, the antibody or antigen-binding fragment thereof binds the same epitope on ANGPTL3 that is recognized by an antibody or fragment thereof comprising heavy and light chain CDR sequences from a HCVR/LCVR sequence pair of SEQ ID NO:3740/3751, 3741/3752, 3742/3753, 3743/3754, 3744/3755, 3745/3756, 3746/3757, 3747/3758, 3748/3759, 3749/3760, or 3750/3761. In some embodiments, the antibody or antigen-biding fragment thereof binds the same epitope on ANGPTL3 as that recognized by the antibody or fragment thereof comprising a HCVR/LCVR sequence pair of SEQ ID NO:3744/3755. In some embodiments, the antibody or fragment thereof binds the same epitope on ANGPTL3 that is recognized by an antibody or fragment thereof comprising a heavy and light chain CDR sequence combination selected from the group consisting of 3784/3795/3762/3806/3817/3773, 3785/3796/3763/3807/3818/3774, 3786/3797/3764/3808/3819/3775, 3787/3798/3765/3809/3820/3776, 3788/3799/3766/3810/3821/3777, 3789/3800/3767/3811/3822/3778, 3790/3801/3768/3812/3823/3779, 3791/3802/3769/3813/3824/3780, 3792/3803/3770/3814/3825/3781, 3793/3804/3771/3815/3826/3782 and 3794/3805/3772/3816/3827/3783. In some embodiments, such an epitope is recognized by an antibody or fragment thereof comprising a heavy and light chain CDR sequence combination of SEQ ID NO:3788/3799/3766/3810/3821/3777.

[0067] In some embodiments, an isolated anti-ANGPTL3 antibody or antigen-binding fragment thereof that binds to an epitope situated within the N-terminal coiled-coil region at residues 17 to 209 of SEQ ID NO:3739 and neutralizes, inhibits, abrogates, reduces or interferes with, at least one activity of ANGPTL3. In some embodiments, the isolated antibody or antigen-binding fragment thereof specifically binds to an epitope situated within the N-terminal coiled-coil region of ANGPTL3 (SEQ ID NO:3739) and neutralizes, inhibits, abrogates, reduces or interferes with, at least one activity of ANGPTL3, with the proviso that the antibody or fragment thereof does not bind to the ANGPTL3 peptide of SEQ ID NO:3828 (corresponds to residues Glu32 to Leu57 of ANGPTL3 of SEQ ID NO:3739). In some embodiments, the antibody or fragment thereof specifically binds to an epitope within residues 17 to 200, 17 to 100, 17 to 70, 17 to 65, 17 to 60, 17 to 57, or 17 to 50, of ANGPTL3 (SEQ ID NO:3739), optionally with the proviso that the antibody or fragment thereof does not bind to the ANGPTL3 peptide of SEQ ID NO:3828. In some embodiments, the antibody or fragment thereof specifically binds to an epitope within residues 40 to 200, 40 to 100, 40 to 70, 50 to 200, 50 to 100, 50 to 70, 58 to 200, 58 to 100, 58 to 70, 58 to 68, or 61 to 66, of ANGPTL3 (SEQ ID NO:3739), optionally with the proviso that the antibody or fragment thereof does not bind to the ANGPTL3 peptide of SEQ ID NO:3828. In some embodiments, the antibody or antibody fragment binds an epitope which may involve more than one of the enumerated epitopes or residues within the N-terminal coiled-coil region of ANGPTL3, optionally with the proviso that the antibody or fragment thereof does not bind to the ANGPTL3 peptide of SEQ ID NO:3828.

[0068] In some embodiments, the antibody or fragment thereof comprises a HCVR encoded by a nucleic acid sequence selected from the group consisting of SEQ ID NO:3829, 3830, 3831, 3832, 3833, 3834, 3835, 3836, 3837, 3838, and 3839, or a substantially identical sequence having at least 90%, at least 95%, at least 98%, or at least 99% homology thereof. In some embodiments, the antibody or fragment thereof comprises a HCVR encoded by a nucleic acid sequence of SEQ ID NO:3829, 3830, 3831, 3833, 3834, 3836, or 3839. In some embodiments, the antibody or fragment thereof comprises a HCVR encoded by a nucleic acid sequence of SEQ ID NO:3833.

[0069] In some embodiments, an antibody or antigen-binding fragment thereof comprises a LCVR encoded by a nucleic acid sequence selected from the group consisting of SEQ ID NO:3840, 3841, 3842, 3843, 3844, 3845, 3846, 3847, 3848, 3849, and 3850, or a substantially identical sequence having at least 90%, at least 95%, at least 98%, or at least 99% homology thereof. In some embodiments, the antibody or fragment thereof comprises a LCVR encoded by a nucleic acid sequence of SEQ ID NO:3840, 3841, 3842, 3844, 3845, 3847, or 3850. In some embodiments, the antibody or fragment thereof comprises a LCVR encoded by a nucleic acid sequence of SEQ ID NO:3844.

[0070] In some embodiments, the antibody or fragment thereof comprises a HCVR and LCVR (HCVR/LCVR) sequence pair encoded by a nucleic acid sequence pair selected from the group consisting of SEQ ID NO:3829/3840, 3830/3841, 3831/3842, 3832/3843, 3833/3844, 3834/3845, 3835/3846, 3836/3847, 3837/3848, 3838/3849, and 3839/3850. In some embodiments, the antibody or fragment thereof comprises a HCVR/LCVR sequence pair encoded by a nucleic acid sequence pair of SEQ ID NO:3829/3840, 3830/3841, 3831/3842, 3833/3844, 3834/3845, 3836/3847, or 3839/3850. In some embodiments, the antibody or fragment thereof comprises a HCVR/LCVR sequence pair encoded by a nucleic acid sequence pair of SEQ ID NO:3833/3844.

[0071] In some embodiments, the antibody or antigen-binding fragment thereof comprises a HCDR3 domain encoded by a nucleotide sequence selected from the group consisting of SEQ ID NO:3851, 3852, 3853, 3854, 3855, 3856, 3857, 3858, 3859, 3860, and 3861, or a substantially identical sequence having at least 90%, at least 95%, at least 98%, or at least 99% homology thereof; and a LCDR3 domain encoded by a nucleotide sequence selected from the group consisting of SEQ ID NO:3862, 3863, 3864, 3865, 3866, 3867, 3868, 3869, 3870, 3871, and 3872, or a substantially identical sequence having at least 90%, at least 95%, at least 98%, or at least 99% homology thereof. In some embodiments, the antibody or fragment thereof comprises a HCDR3 and LCDR3 sequence pair encoded by the nucleic acid sequence pair selected from the group consisting of SEQ ID NO:3851/3862, 3852/3863, 3853/3864, 3854/3865, 3855/3866, 3856/3867, 3857/3868, 3858/3869, 3859/3870, 3860/3871 and 3861/3872. In some embodiments, the antibody or fragment thereof comprises a HCDR3 and LCDR3 sequence pair encoded by the nucleic acid sequence pair of SEQ ID NO:3851/3862, 3852/3863, 3853/3864, 3855/3866, 3856/3867, 3858/3869 or 3861/3872. In some embodiments, the antibody or fragment thereof comprises a HCDR3 and LCDR3 sequence pair encoded by the nucleic acid sequence pair of SEQ ID NO:3855/3866.

[0072] In some embodiments, the antibody or fragment thereof further comprises a HCDR1 domain encoded by a nucleotide sequence selected from the group consisting of SEQ ID NO:3873, 3874, 3875, 3876, 3877, 3878, 3879, 3880, 3881, 3882, and 3883, or a substantially identical sequence having at least 90%, at least 95%, at least 98%, or at least 99% homology thereof; and a HCDR2 domain encoded by a nucleotide sequence selected from the group consisting of SEQ ID NO:3884, 3885, 3886, 3887, 3888, 3889, 3890, 3891, 3892, 3893, and 3894, or a substantially identical sequence having at least 90%, at least 95%, at least 98%, or at least 99% homology thereof; and optionally further comprises a LCDR1 domain encoded by a nucleotide sequence selected from the group consisting of SEQ ID NO:3895, 3896, 3897, 3898, 3899, 3900, 3901, 3902, 3903, 3904, and 3905, or a substantially identical sequence having at least 90%, at least 95%, at least 98%, or at least 99% homology thereof; and/or a LCDR2 domain encoded by a nucleotide sequence selected from the group consisting of SEQ ID NO:3906 (gctgcatcc), 3907 (aaggcgtct), 3908 (gctgcatcc), 3909 (aaggcgtct), 3910 (aaggcgtct), 3911 (actacttcc), 3912 (cctgcatcc), 3913 (actgcatcc), 3914 (aaggtttct), 3915 (gttgcagcc), and 3916, or a substantially identical sequence having at least 90%, at least 95%, at least 98%, or at least 99% homology thereof.

[0073] In some embodiments, the antibody or antigen-binding fragment thereof comprises a HCDR1/HCDR2/HCDR3 combination encoded by a nucleotide sequence combination selected from the group consisting of SEQ ID NO:3873/3884/3851, 3874/3885/3852, 3875/3886/3853, 3876/3887/3854, 3877/3888/3855, 3878/3889/3856, 3879/3890/3857, 3880/3891/3858, 3881/3892/3859, 3882/3893/3860, and 3883/3894/3861; and/or a LCDR1/LCDR2/LCDR3 combination encoded by a nucleotide sequence combination selected from the group consisting of SEQ ID NO:3895/3906/3862, 3896/3907/3863, 3897/3908/3864, 3898/3909/3865, 3899/3910/3866, 3900/3911/3867, 3901/3912/3868, 3902/3913/3869, 3903/3914/3870, 3904/3915/3871, and 3905/3916/3872. In some embodiments, the antibody or fragment thereof comprises heavy and light chain CDR sequences encoded by a nucleotide sequence combination of SEQ ID NO:3877/3888/3855/3899/3910/3866.

[0074] In some embodiments, the anti-ANGPTL3 antibody or antigen-binding fragment thereof comprises a heavy chain variable region (HCVR) encoded by nucleotide sequence segments derived from V_{H}, D_{H} and J_{H} germline sequences, and a light chain variable region (LCVR) encoded by nucleotide sequence segments derived from V_{K} and J_{K} germline sequences, wherein the HCVR and the LCVR are encoded by nucleotide sequence segments derived from a germline gene combination selected from the group consisting of: (i) V_{H}3-43, D_{H}3-3, 43, V_{K}1-5 and J_{K}2; (ii) V_{H}3-11, D_{H}1-1, J_{H}4, V_{K}1-39 and J_{K}4; (iii) V_{H}3-30, D_{H}1-7, J_{H}6, V_{K}1-5 and J_{K}1; (iv) V_{H}3-30, D_{H}1-26, J_{H}6, V_{K}1-12 and J_{K}3; (v) V_{H}3-30, D_{H}3-10, J_{H}6, V_{K}1-12 and J_{K}3; and (vi) V_{H}3-23, D_{H}3-10, J_{H}4, V_{K}1-5 and J_{K}1.

[0075] In some embodiments, the antibody or antigen-binding fragment thereof specifically binds to ANGPTL3 with an equilibrium dissociation constant (K_{D}) of about 7 nM or less, about 6 nM or less, about 5 nM or less, about 4 nM or less, about 3 nM or less, about 2 nM or less, or about 1 nM or less, as measured by surface plasmon resonance assay (for example, BIACORE™). In some embodiments, the antibody exhibits a K_{D} of about 800 pM or less, about 700 pM or less; about 600 pM or less; about 500 pM or less; about 400 pM or less; about 300 pM or less; about 200 pM or less; about 100 pM or less; or about 50 pM or less.

[0076] In some embodiments, the anti-ANGPTL3 antibodies have a modified glycosylation pattern. In some applications, modification to remove undesirable glycosylation sites may be useful, or e.g., removal of a fucose moiety to increase antibody dependent cellular cytotoxicity (ADCC) function (see, Shield et al., J. Biol. Chem., 2002, 277, 26733). In other applications, removal of N-glycosylation site may reduce undesirable immune reactions against the therapeutic antibodies, or increase affinities of the antibodies. In yet other applications, modification of galactosylation can be made in order to modify complement dependent cytotoxicity (CDC).

[0077] In some embodiments, the ANGPTL3 antibody is evinacumab.

[0078] In some embodiments, the SLC5A2 inhibitor comprises an inhibitory nucleic acid molecule. Examples of inhibitory nucleic acid molecules include, but are not limited to, antisense nucleic acid molecules, siRNAs, and shRNAs. Such inhibitory nucleic acid molecules can be designed to target any region of an SLC5A2 nucleic acid molecule. In some embodiments, the antisense RNA, siRNA, or shRNA hybridizes to a sequence within an SLC5A2 genomic nucleic acid molecule or mRNA molecule and decreases expression of the SLC5A2 polypeptide in a cell in the subject. In some embodiments, the SLC5A2 inhibitor comprises an antisense molecule that hybridizes to an SLC5A2 genomic nucleic acid molecule or mRNA molecule and decreases expression of the SLC5A2 polypeptide in a cell in the subject. In some embodiments, the SLC5A2 inhibitor comprises an siRNA that hybridizes to an SLC5A2 genomic nucleic acid molecule or mRNA molecule and decreases expression of the SLC5A2 polypeptide in a cell in the subject. In some embodiments, the SLC5A2 inhibitor comprises an shRNA that hybridizes to an SLC5A2 genomic nucleic acid molecule or mRNA molecule and decreases expression of the SLC5A2 polypeptide in a cell in the subject.

[0079] In some embodiments, the SLC5A2 antisense nucleic acid molecules comprise or consist of any of the nucleotide sequences represented by SEQ ID NOs: 1190-1569. In some embodiments, the SLC5A2 siRNA molecules comprise or consist of any of the nucleotide sequences (sense and antisense strands presented one after the other) represented by SEQ ID NOs: 1570-3737 (e.g., the sense strand is, for example, SEQ ID NO:1570 and the corresponding antisense strand is SEQ ID NO:1571; the sense strand is, for example, SEQ ID NO:3736 and the corresponding antisense strand is SEQ ID NO:3737; etc.).

[0080] In some embodiments, the SLC5A2 inhibitor comprises a nuclease agent that induces one or more nicks or double-strand breaks at a recognition sequence(s) or a DNA-binding protein that binds to a recognition sequence within an SLC5A2 genomic nucleic acid molecule. The recognition sequence can be located within a coding region of the SLC5A2 gene, or within regulatory regions that influence the expression of the gene. A recognition sequence of the DNA-binding protein or nuclease agent can be located in an intron, an exon, a promoter, an enhancer, a regulatory region, or any non-protein coding region. The recognition sequence can include or be proximate to the start codon of the SLC5A2 gene. For example, the recognition sequence can be located about 10, about 20, about 30, about 40, about 50, about 100, about 200, about 300, about 400, about 500, or about 1,000 nucleotides from the start codon. As another example, two or more nuclease agents can be used, each targeting a nuclease recognition sequence including or proximate to the start codon. As another example, two nuclease agents can be used, one targeting a nuclease recognition sequence including or proximate to the start codon, and one targeting a nuclease recognition sequence including or proximate to the stop codon, wherein cleavage by the nuclease agents can result in deletion of the coding region between the two nuclease recognition sequences. Any nuclease agent that induces a nick or double-strand break into a desired recognition sequence can be used in the methods and compositions disclosed herein. Any DNA-binding protein that binds to a desired recognition sequence can be used in the methods and compositions disclosed herein.

[0081] Suitable nuclease agents and DNA-binding proteins for use herein include, but are not limited to, zinc finger protein or zinc finger nuclease (ZFN) pair, Transcription Activator-Like Effector (TALE) protein or Transcription Activator-Like Effector Nuclease (TALEN), or Clustered Regularly Interspersed Short Palindromic Repeats (CRISPR)/CRISPR-associated (Cas) systems. The length of the recognition sequence can vary, and includes, for example, recognition sequences that are about 30-36 bp for a zinc finger protein or ZFN pair, about 15-18 bp for each ZFN, about 36 bp for a TALE protein or TALEN, and about 20 bp for a CRISPR/Cas guide RNA.

[0082] In some embodiments, CRISPR/Cas systems can be used to modify an SLC5A2 genomic nucleic acid molecule within a cell. The methods and compositions disclosed herein can employ CRISPR-Cas systems by utilizing CRISPR complexes (comprising a guide RNA (gRNA) complexed with a Cas protein) for site-directed cleavage of SLC5A2 nucleic acid molecules.

[0083] Cas proteins generally comprise at least one RNA recognition or binding domain that can interact with gRNAs. Cas proteins can also comprise nuclease domains (such as, for example, DNase or RNase domains), DNA binding domains, helicase domains, protein-protein interaction domains, dimerization domains, and other domains. Suitable Cas proteins include, for example, a wild type Cas9 protein and a wild type Cpf1 protein (such as, for example, FnCpf1). A Cas protein can have full cleavage activity to create a double-strand break in an SLC5A2 genomic nucleic acid molecule or it can be a nickase that creates a single-strand break in an SLC5A2 genomic nucleic acid molecule. Additional examples of Cas proteins include, but are not limited to, Cas1, Cas1B, Cas2, Cas3, Cas4, Cas5, Cas5e (CasD), Cas6, Cas6e, Cas6f, Cas7, Cas8a1, Cas8a2, Cas8b, Cas8c, Cas9 (Csn1 or Csx12), Cas10, Cas10d, CasF, CasG, CasH, Csy1, Csy2, Csy3, Cse1 (CasA), Cse2 (CasB), Cse3 (CasE), Cse4 (CasC), Csc1, Csc2, Csa5, Csn2, Csm2, Csm3, Csm4, Csm5, Csm6, Cmr1, Cmr3, Cmr4, Cmr5, Cmr6, Csb1, Csb2, Csb3, Csx17, Csx14, Csx10, Csx16, CsaX, Csx3, Csx1, Csx15, Csf1, Csf2, Csf3, Csf4, and Cu1966, and homologs or modified versions thereof. In some embodiments, a Cas system, such as Cas12a, can have multiple gRNAs encoded into a single crRNA. Cas proteins can also be operably linked to heterologous polypeptides as fusion proteins. For example, a Cas protein can be joined or fused to a cleavage domain, an epigenetic modification domain, a transcriptional activation domain, or a transcriptional repressor domain. Cas proteins can be provided in any form. For example, a Cas protein can be provided in the form of a protein, such as a Cas protein complexed with a gRNA. Alternately, a Cas protein can be provided in the form of a nucleic acid molecule encoding the Cas protein, such as an RNA or DNA.

[0084] In some embodiments, targeted genetic modifications of SLC5A2 genomic nucleic acid molecules can be generated by contacting a cell with a Cas protein and one or more gRNAs that hybridize to one or more gRNA recognition sequences within a target genomic locus in the SLC5A2 genomic nucleic acid molecule. The gRNA recognition sequence can include or be proximate to the start codon of an SLC5A2 genomic nucleic acid molecule or the stop codon of an SLC5A2 genomic nucleic acid molecule. For example, the gRNA recognition sequence can be located from about 10, from about 20, from about 30, from about 40, from about 50, from about 100, from about 200, from about 300, from about 400, from about 500, or from about 1,000 nucleotides of the start codon or the stop codon.

[0085] The gRNA recognition sequences within a target genomic locus in an SLC5A2 genomic nucleic acid molecule are located near a Protospacer Adjacent Motif (PAM) sequence, which is a 2-6 base pair DNA sequence immediately following the DNA sequence targeted by the Cas9 nuclease. The canonical PAM is the sequence 5′-NGG-3′ where “N” is any nucleobase followed by two guanine (“G”) nucleobases. gRNAs can transport Cas9 to anywhere in the genome for gene editing, but no editing can occur at any site other than one at which Cas9 recognizes PAM. In addition, 5′-NGA-3′ can be a highly efficient non-canonical PAM for human cells. Generally, the PAM is about 2-6 nucleotides downstream of the DNA sequence targeted by the gRNA. The PAM can flank the gRNA recognition sequence. In some embodiments, the gRNA recognition sequence can be flanked on the 3′ end by the PAM. In some embodiments, the gRNA recognition sequence can be flanked on the 5′ end by the PAM. For example, the cleavage site of Cas proteins can be about 1 to about 10, about 2 to about 5 base pairs, or three base pairs upstream or downstream of the PAM sequence. In some embodiments (such as when Cas9 from S. pyogenes or a closely related Cas9 is used), the PAM sequence of the non-complementary strand can be 5′-NGG-3′, where N is any DNA nucleotide and is immediately 3′ of the gRNA recognition sequence of the non-complementary strand of the target DNA. As such, the PAM sequence of the complementary strand would be 5′-CCN-3′, where N is any DNA nucleotide and is immediately 5′ of the gRNA recognition sequence of the complementary strand of the target DNA.

[0086] A gRNA is an RNA molecule that binds to a Cas protein and targets the Cas protein to a specific location within an SLC5A2 genomic nucleic acid molecule. An exemplary gRNA is a gRNA effective to direct a Cas enzyme to bind to or cleave an SLC5A2 genomic nucleic acid molecule, wherein the gRNA comprises a DNA-targeting segment that hybridizes to a gRNA recognition sequence within the SLC5A2 genomic nucleic acid molecule. Exemplary gRNAs comprise a DNA-targeting segment that hybridizes to a gRNA recognition sequence present within an SLC5A2 genomic nucleic acid molecule that includes or is proximate to the start codon or the stop codon. For example, a gRNA can be selected such that it hybridizes to a gRNA recognition sequence that is located from about 5, from about 10, from about 15, from about 20, from about 25, from about 30, from about 35, from about 40, from about 45, from about 50, from about 100, from about 200, from about 300, from about 400, from about 500, or from about 1,000 nucleotides of the start codon or located from about 5, from about 10, from about 15, from about 20, from about 25, from about 30, from about 35, from about 40, from about 45, from about 50, from about 100, from about 200, from about 300, from about 400, from about 500, or from about 1,000 nucleotides of the stop codon. Suitable gRNAs can comprise from about 17 to about 25 nucleotides, from about 17 to about 23 nucleotides, from about 18 to about 22 nucleotides, or from about 19 to about 21 nucleotides. In some embodiments, the gRNAs can comprise 20 nucleotides.

[0087] The Cas protein and the gRNA form a complex, and the Cas protein cleaves the target SLC5A2 genomic nucleic acid molecule. The Cas protein can cleave the nucleic acid molecule at a site within or outside of the nucleic acid sequence present in the target SLC5A2 genomic nucleic acid molecule to which the DNA-targeting segment of a gRNA will bind. For example, formation of a CRISPR complex (comprising a gRNA hybridized to a gRNA recognition sequence and complexed with a Cas protein) can result in cleavage of one or both strands in or near (such as, for example, within 1, 2, 3, 4, 5, 6, 7, 8, 9, 10, 20, 50, or more base pairs from) the nucleic acid sequence present in the SLC5A2 genomic nucleic acid molecule to which a DNA-targeting segment of a gRNA will bind.

[0088] Such methods can result, for example, in an SLC5A2 genomic nucleic acid molecule in which a region of the SLC5A2 genomic nucleic acid molecule is disrupted, the start codon is disrupted, the stop codon is disrupted, or the coding sequence is disrupted or deleted. Optionally, the cell can be further contacted with one or more additional gRNAs that hybridize to additional gRNA recognition sequences within the target genomic locus in the SLC5A2 genomic nucleic acid molecule. By contacting the cell with one or more additional gRNAs (such as, for example, a second gRNA that hybridizes to a second gRNA recognition sequence), cleavage by the Cas protein can create two or more double-strand breaks or two or more single-strand breaks.

[0089] In some embodiments, the SLC5A2 inhibitor targets the SGLT2 polypeptide (the polypeptide encoded by the SLC5A2 gene). In some embodiments, the SLC5A2 inhibitor comprises INVOKANA® (canagliflozin), FORXIGA® (dapagliflozin), JARDIANCE® (empagliflozin), SUGLAT® (ipragliflozin), LUSEFI® (luseogliflozin), or APLEWAY® (tofogliflozin), or any combination thereof. In some embodiments, the SLC5A2 inhibitor comprises canagliflozin, dapagliflozin, empagliflozin, ipragliflozin, luseogliflozin, or tofogliflozin, or any combination thereof. In some embodiments, the SLC5A2 inhibitor comprises canagliflozin. In some embodiments, the SLC5A2 inhibitor comprises dapagliflozin. In some embodiments, the SLC5A2 inhibitor comprises empagliflozin. In some embodiments, the SLC5A2 inhibitor comprises ipragliflozin. In some embodiments, the SLC5A2 inhibitor comprises luseogliflozin. In some embodiments, the SLC5A2 inhibitor comprises tofogliflozin.

[0090] The inhibitory nucleic acid molecules can comprise RNA, DNA, or both RNA and DNA. The inhibitory nucleic acid molecules can also be joined or fused to a heterologous nucleic acid sequence, such as in a vector, or a heterologous label. For example, the inhibitory nucleic acid molecules can be within a vector or as an exogenous donor sequence comprising the inhibitory nucleic acid molecule and a heterologous nucleic acid sequence. The inhibitory nucleic acid molecules can also be joined or fused to a heterologous label. The label can be directly detectable (such as, for example, fluorophore) or indirectly detectable (such as, for example, hapten, enzyme, or fluorophore quencher). Such labels can be detectable by spectroscopic, photochemical, biochemical, immunochemical, or chemical means. Such labels include, for example, radiolabels, pigments, dyes, chromogens, spin labels, and fluorescent labels. The label can also be, for example, a chemiluminescent substance; a metal-containing substance; or an enzyme, where there occurs an enzyme-dependent secondary generation of signal. The term “label” can also refer to a “tag” or hapten that can bind selectively to a conjugated molecule such that the conjugated molecule, when added subsequently along with a substrate, is used to generate a detectable signal. For example, biotin can be used as a tag along with an avidin or streptavidin conjugate of horseradish peroxidate (HRP) to bind to the tag, and examined using a calorimetric substrate (such as, for example, tetramethylbenzidine (TMB)) or a fluorogenic substrate to detect the presence of HRP. Exemplary labels that can be used as tags to facilitate purification include, but are not limited to, myc, HA, FLAG or 3×FLAG, 6×His or polyhistidine, glutathione-S-transferase (GST), maltose binding protein, an epitope tag, or the Fc portion of immunoglobulin. Numerous labels include, for example, particles, fluorophores, haptens, enzymes and their calorimetric, fluorogenic and chemiluminescent substrates and other labels.

[0091] The inhibitory nucleic acid molecules can comprise, for example, nucleotides or non-natural or modified nucleotides, such as nucleotide analogs or nucleotide substitutes. Such nucleotides include a nucleotide that contains a modified base, sugar, or phosphate group, or that incorporates a non-natural moiety in its structure. Examples of non-natural nucleotides include, but are not limited to, dideoxynucleotides, biotinylated, aminated, deaminated, alkylated, benzylated, and fluorophor-labeled nucleotides.

[0092] The inhibitory nucleic acid molecules can also comprise one or more nucleotide analogs or substitutions. A nucleotide analog is a nucleotide which contains a modification to either the base, sugar, or phosphate moieties. Modifications to the base moiety include, but are not limited to, natural and synthetic modifications of A, C, G, and T/U, as well as different purine or pyrimidine bases such as, for example, pseudouridine, uracil-5-yl, hypoxanthin-9-yl (I), and 2-aminoadenin-9-yl. Modified bases include, but are not limited to, 5-methylcytosine (5-me-C), 5-hydroxymethyl cytosine, xanthine, hypoxanthine, 2-aminoadenine, 6-methyl and other alkyl derivatives of adenine and guanine, 2-propyl and other alkyl derivatives of adenine and guanine, 2-thiouracil, 2-thiothymine and 2-thiocytosine, 5-halouracil and cytosine, 5-propynyl uracil and cytosine, 6-azo uracil, cytosine and thymine, 5-uracil (pseudouracil), 4-thiouracil, 8-halo, 8-amino, 8-thiol, 8-thioalkyl, 8-hydroxyl and other 8-substituted adenines and guanines, 5-halo (such as, for example, 5-bromo), 5-trifluoromethyl and other 5-substituted uracils and cytosines, 7-methylguanine, 7-methyladenine, 8-azaguanine, 8-azaadenine, 7-deazaguanine, 7-deazaadenine, 3-deazaguanine, and 3-deazaadenine.

[0093] Nucleotide analogs can also include modifications of the sugar moiety. Modifications to the sugar moiety include, but are not limited to, natural modifications of the ribose and deoxy ribose as well as synthetic modifications. Sugar modifications include, but are not limited to, the following modifications at the 2′ position: OH; F; O-, S-, or N-alkyl; O-, S-, or N-alkenyl; O-, S- or N-alkynyl; or O-alkyl-O-alkyl, wherein the alkyl, alkenyl, and alkynyl may be substituted or unsubstituted C₁₋₁₀alkyl or C₂₋₁₀alkenyl, and C₂₋₁₀alkynyl. Exemplary 2′ sugar modifications also include, but are not limited to, —O[(CH₂)ₙO]ₘCH₃, —O(CH₂)ₙOCH₃, —O(CH₂)ₙNH₂, —O(CH₂)ₙCH₃, —O(CH₂)ₙ—ONH₂, and —O(CH₂)ₙON[(CH₂)ₙCH₃)]₂, where n and m, independently, are from 1 to about 10. Other modifications at the 2′ position include, but are not limited to, C₁₋₁₀alkyl, substituted lower alkyl, alkaryl, aralkyl, O-alkaryl or O-aralkyl, SH, SCH₃, OCN, Cl, Br, CN, CF₃, OCF₃, SOCH₃, SO₂CH₃, ONO₂, NO₂, N₃, NH₂, heterocycloalkyl, heterocycloalkaryl, aminoalkylamino, polyalkylamino, substituted silyl, an RNA cleaving group, a reporter group, an intercalator, a group for improving the pharmacokinetic properties of an oligonucleotide, or a group for improving the pharmacodynamic properties of an oligonucleotide, and other substituents having similar properties. Similar modifications may also be made at other positions on the sugar, particularly the 3′ position of the sugar on the 3′ terminal nucleotide or in 2′-5′ linked oligonucleotides and the 5′ position of 5′ terminal nucleotide. Modified sugars can also include those that contain modifications at the bridging ring oxygen, such as CH₂ and S. Nucleotide sugar analogs can also have sugar mimetics, such as cyclobutyl moieties in place of the pentofuranosyl sugar.

[0094] Nucleotide analogs can also be modified at the phosphate moiety. Modified phosphate moieties include, but are not limited to, those that can be modified so that the linkage between two nucleotides contains a phosphorothioate, chiral phosphorothioate, phosphorodithioate, phosphotriester, aminoalkylphosphotriester, methyl and other alkyl phosphonates including 3′-alkylene phosphonate and chiral phosphonates, phosphinates, phosphoramidates including 3′-amino phosphoramidate and aminoalkylphosphoramidates, thionophosphoramidates, thionoalkylphosphonates, thionoalkylphosphotriesters, and boranophosphates. These phosphate or modified phosphate linkage between two nucleotides can be through a 3′-5′ linkage or a 2′-5′ linkage, and the linkage can contain inverted polarity such as 3′-5′ to 5′-3′ or 2′-5′ to 5′-2′. Various salts, mixed salts, and free acid forms are also included. Nucleotide substitutes also include peptide nucleic acids (PNAs).

[0095] In some embodiments, the antisense nucleic acid molecules are gapmers, whereby the first one to seven nucleotides at the 5′ and 3′ ends each have 2′-methoxyethyl (2′-MOE) modifications. In some embodiments, the first five nucleotides at the 5′ and 3′ ends each have 2′-MOE modifications. In some embodiments, the first one to seven nucleotides at the 5′ and 3′ ends are RNA nucleotides. In some embodiments, the first five nucleotides at the 5′ and 3′ ends are RNA nucleotides. In some embodiments, each of the backbone linkages between the nucleotides is a phosphorothioate linkage.

[0096] In some embodiments, the siRNA molecules have termini modifications. In some embodiments, the 5′ end of the antisense strand is phosphorylated. In some embodiments, 5′-phosphate analogs that cannot be hydrolyzed, such as 5′-(E)-vinyl-phosphonate are used.

[0097] In some embodiments, the siRNA molecules have backbone modifications. In some embodiments, the modified phosphodiester groups that join consecutive ribose nucleosides have been shown to enhance the stability and in vivo bioavailability of siRNAs The non-ester groups (—OH, ═O) of the phosphodiester linkage can be replaced with sulfur, boron, or acetate to give phosphorothioate, boranophosphate, and phosphonoacetate linkages. In addition, substituting the phosphodiester group with a phosphotriester can facilitate cellular uptake of siRNAs and retention on serum components by eliminating their negative charge. In some embodiments, the siRNA molecules have sugar modifications. In some embodiments, the sugars are deprotonated (reaction catalyzed by exo- and endonucleases) whereby the 2′-hydroxyl can act as a nucleophile and attack the adjacent phosphorous in the phosphodiester bond. Such alternatives include 2′-O-methyl, 2′-O-methoxyethyl, and 2′-fluoro modifications.

[0098] In some embodiments, the siRNA molecules have base modifications. In some embodiments, the bases can be substituted with modified bases such as pseudouridine, 5′-methylcytidine, N6-methyladenosine, inosine, and N7-methylguanosine.

[0099] In some embodiments, the siRNA molecules are conjugated to lipids. Lipids can be conjugated to the 5′ or 3′ termini of siRNA to improve their in vivo bioavailability by allowing them to associate with serum lipoproteins. Representative lipids include, but are not limited to, cholesterol and vitamin E, and fatty acids, such as palmitate and tocopherol.

[0100] In some embodiments, a representative siRNA has the following formula:
[0101] Sense: mN*mN*/i2FN/mN/i2FN/mN/i2FN/mN/i2FN/mN/i2FN/mN/i2FN/mN/i2FN/mN/i2FN/*mN*/32FN/
[0102] Antisense: /52FN/*/i2FN/*mN/i2FN/mN/i2FN/mN/i2FN/mN/i2FN/mN/i2FN/mN/i2FN/mN/i2FN/mN/i2FN/mN*N*N

[0103] wherein: “N” is the base; “2F” is a 2′-F modification; “m” is a 2′-O-methyl modification, “I” is an internal base; and “*” is a phosphorothioate backbone linkage.

[0104] In any of the embodiments described herein for antisense molecules and siRNA molecules, the molecules can comprise 1, 2, or 3 additional nucleotides at the 5′ end, 3′ end, or both the 5′ end and 3′ end. In some embodiments the antisense molecules and siRNA molecules comprise 1, 2, or 3 additional nucleotides at the 5′ end. In some embodiments the antisense molecules and siRNA molecules comprise 1, 2, or 3 additional nucleotides at the 3′ end. In some embodiments the antisense molecules and siRNA molecules comprise 1, 2, or 3 additional nucleotides at both the 5′ end and 3′ end.

[0105] In any of the embodiments described herein for antisense molecules and siRNA molecules, the molecules can comprise a substantially identical sequence having at least 80%, at least 85%, at least 90%, at least 95%, at least 98%, or at least 99% homology to the nucleotide sequences disclosed herein. In some embodiments, the antisense molecules and siRNA molecules have at least 80% homology to the nucleotide sequences disclosed herein. In some embodiments, the antisense molecules and siRNA molecules have at least 85% homology to the nucleotide sequences disclosed herein. In some embodiments, the antisense molecules and siRNA molecules have at least 90% homology to the nucleotide sequences disclosed herein. In some embodiments, the antisense molecules and siRNA molecules have at least 95% homology to the nucleotide sequences disclosed herein. In some embodiments, the antisense molecules and siRNA molecules have at least 98% homology to the nucleotide sequences disclosed herein. In some embodiments, the antisense molecules and siRNA molecules have at least 99% homology to the nucleotide sequences disclosed herein.

[0106] In any of the embodiments described herein, the inhibitory nucleic acid molecules may be administered, for example, as one to two hour i.v. infusions or s.c. injections. In any of the embodiments described herein, the inhibitory nucleic acid molecules may be administered at dose levels that range from about 50 mg to about 900 mg, from about 100 mg to about 800 mg, from about 150 mg to about 700 mg, or from about 175 to about 640 mg (2.5 to 9.14 mg/kg; 92.5 to 338 mg/m²—based on an assumption of a body weight of 70 kg and a conversion of mg/kg to mg/m² dose levels based on a mg/kg dose multiplier value of 37 for humans).

[0107] The present disclosure also provides vectors comprising any one or more of the inhibitory nucleic acid molecules. In some embodiments, the vectors comprise any one or more of the inhibitory nucleic acid molecules and a heterologous nucleic acid. The vectors can be viral or nonviral vectors capable of transporting a nucleic acid molecule. In some embodiments, the vector is a plasmid or cosmid (such as, for example, a circular double-stranded DNA into which additional DNA segments can be ligated). In some embodiments, the vector is a viral vector, wherein additional DNA segments can be ligated into the viral genome. Expression vectors include, but are not limited to, plasmids, cosmids, retroviruses, adenoviruses, adeno-associated viruses (AAV), plant viruses such as cauliflower mosaic virus and tobacco mosaic virus, yeast artificial chromosomes (YACs), Epstein-Barr (EBV)-derived episomes, and other expression vectors known in the art.

[0108] The present disclosure also provides compositions comprising any one or more of the inhibitory nucleic acid molecules. In some embodiments, the composition is a pharmaceutical composition. In some embodiments, the compositions comprise a carrier and/or excipient. Examples of carriers include, but are not limited to, poly(lactic acid) (PLA) microspheres, poly(D,L-lactic-coglycolic-acid) (PLGA) microspheres, liposomes, micelles, inverse micelles, lipid cochleates, and lipid microtubules. A carrier may comprise a buffered salt solution such as PBS, HBSS, etc.

[0109] In some embodiments, the methods further comprise detecting the presence or absence of an ANGPTL3 variant nucleic acid molecule and detecting the presence or absence of an SLC5A2 variant nucleic acid molecule in a biological sample from the subject. The presence or absence of any of the ANGPTL3 variant nucleic acid molecules and SLC5A2 variant nucleic acid molecules can be detected herein. In some embodiments, the methods further comprises administering a kidney disease therapeutic agent to a subject that is: i) ANGPTL3 reference or heterozygous for the ANGPTL3 variant nucleic acid molecule, and ii) SLC5A2 reference or heterozygous for the SLC5A2 variant nucleic acid molecule.

[0110] The present disclosure also provides compositions comprising a combination of any of the ANGPTL3 inhibitors and SLC5A2 inhibitors and a second therapeutic agent. The second therapeutic agent may be one or more of any agent such as (1) 3-hydroxy-3-methylglutaryl-coenzyme A (HMG-CoA) reductase inhibitors, such as cerivastatin, atorvastatin, simvastatin, pitavastatin, rosuvastatin, fluvastatin, lovastatin, pravastatin, and the like; (2) inhibitors of cholesterol uptake and/or bile acid re-absorption; (3) niacin, which increases lipoprotein catabolism; (4) fibrates or amphipathic carboxylic acids, which reduce low-density lipoprotein (LDL) level, improve high-density lipoprotein (HDL) and TG levels, and reduce the number of non-fatal heart attacks; and (5) activators of the LXR transcription factor that plays a role in cholesterol elimination such as 22-hydroxycholesterol, or fixed combinations such as ezetimibe plus simvastatin; a statin with a bile resin (e.g., cholestyramine, colestipol, colesevelam), a fixed combination of niacin plus a statin (e.g., niacin with lovastatin); or with other lipid lowering agents such as omega-3-fatty acid ethyl esters (for example, omacor). Furthermore, the second therapeutic agent can be one or more other inhibitors of ANGPTL3 as well as inhibitors of other molecules, such as ANGPTL4, ANGPTL5, ANGPTL6 and proprotein convertase subtilisin/kexin type 9 (PCSK9), which are involved in lipid metabolism, in particular, cholesterol and/or triglyceride homeostasis. Inhibitors of these molecules include small molecules and antibodies that specifically bind to these molecules and block their activity.

[0111] The present disclosure also provides methods of treating a subject with a kidney disease therapeutic agent. In some embodiments, the subject has a kidney disease. In some embodiments, the subject is at risk of developing a kidney disease. The methods comprise administering a kidney disease therapeutic agent to the subject. The methods comprise determining whether the subject has an ANGPTL3 variant nucleic acid molecule and whether the subject has an SLC5A2 variant nucleic acid molecule. The determination can be carried out by obtaining or having obtained a biological sample from the subject, and performing or having performed a sequence analysis on the biological sample to determine if the subject has a genotype comprising the ANGPTL3 variant nucleic acid molecule, and the SLC5A2 variant nucleic acid molecule. The methods comprise administering or continuing to administer the kidney disease therapeutic agent to a subject that is homozygous for both the ANGPTL3 variant nucleic acid molecule and the SLC5A2 variant nucleic acid molecule. The methods comprise administering or continuing to administer the kidney disease therapeutic agent and/or an ANGPTL3 inhibitor and an SLC5A2 inhibitor to a subject that is: i) heterozygous for both the ANGPTL3 variant nucleic acid molecule and the SLC5A2 variant nucleic acid molecule, ii) heterozygous for one of the ANGPTL3 variant nucleic acid molecule and the SLC5A2 variant nucleic acid molecule and reference for the other of the ANGPTL3 variant nucleic acid molecule and the SLC5A2 variant nucleic acid molecule, or iii) ANGPTL3 reference and SLC5A2 reference. The presence of a genotype having the ANGPTL3 variant nucleic acid molecule and the SLC5A2 variant nucleic acid molecule indicates the subject has a decreased risk of developing a kidney disease.

[0112] In some embodiments, the kidney disease is chronic kidney disease. In some embodiments, the kidney disease is diabetic kidney disease. In some embodiments, the kidney disease is a kidney stone. In some embodiments, the kidney disease is chronic glomerulonephritis. In some embodiments, the kidney disease is nephronophthisis. In some embodiments, the kidney disease is chronic interstitial nephritis. In some embodiments, the kidney disease is nephrosclerosis.

[0113] For subjects that are genotyped or determined to be: i) either ANGPTL3 reference or heterozygous for an ANGPTL3 variant nucleic acid molecule, and ii) either SLC5A2 reference or heterozygous for an SLC5A2 variant nucleic acid molecule, such subjects can be administered an ANGPTL3 inhibitor and an SLC5A2 inhibitor, as described herein.

[0114] In some embodiments, the ANGPTL3 variant nucleic acid molecule is a missense variant, a splice-site variant, a stop-gain variant, a start-loss variant, a stop-loss variant, a frameshift variant, an in-frame indel variant, or a variant that encodes a truncated ANGPTL3 polypeptide. In some embodiments, the SLC5A2 variant nucleic acid molecule is a missense variant, a splice-site variant, a stop-gain variant, a start-loss variant, a stop-loss variant, a frameshift variant, an in-frame indel variant, or a variant that encodes a truncated SLC5A2 polypeptide.

[0115] Detecting the presence or absence of an ANGPTL3 variant nucleic acid molecule and an SLC5A2 variant nucleic acid molecule in a biological sample from a subject and/or determining whether a subject has an ANGPTL3 variant nucleic acid molecule an SLC5A2 variant nucleic acid molecule can be carried out by any of the methods described herein. In some embodiments, these methods can be carried out in vitro. In some embodiments, these methods can be carried out in situ. In some embodiments, these methods can be carried out in vivo. In any of these embodiments, the nucleic acid molecule can be present within a cell obtained from the subject.

[0116] In some embodiments, the subject is ANGPTL3 reference or heterozygous for the ANGPTL3 variant nucleic acid molecule, and SLC5A2 reference or heterozygous for the SLC5A2 variant nucleic acid molecule, and the subject is administered or continued to be administered the kidney disease therapeutic agent and/or an ANGPTL3 inhibitor and an SLC5A2 inhibitor. The ANGPTL3 inhibitor and the SLC5A2 inhibitor can be any of the inhibitors described here, or any combination thereof.

[0117] In some embodiments, the treatment or prevention methods comprise detecting the presence or absence of an ANGPTL3 variant polypeptide and an SLC5A2 variant polypeptide in a biological sample from the subject. In some embodiments, when the subject does not have an ANGPTL3 variant polypeptide and an SLC5A2 variant polypeptide, the subject is administered a kidney disease therapeutic agent and is administered an ANGPTL3 inhibitor and an SLC5A2 inhibitor.

[0118] The present disclosure also provides methods of treating a subject with a kidney disease therapeutic agent, wherein the subject has a kidney disease or is at risk of developing a kidney disease. In some embodiments, the method comprises determining whether the subject has an ANGPTL3 variant polypeptide and an SLC5A2 variant polypeptide by obtaining or having obtained a biological sample from the subject, and performing or having performed an assay on the biological sample to determine if the subject has an ANGPTL3 variant polypeptide and an SLC5A2 variant polypeptide. When the subject does not have an ANGPTL3 variant polypeptide and an SLC5A2 variant polypeptide, the kidney disease therapeutic agent is administered or continued to be administered to the subject and/or an ANGPTL3 inhibitor and an SLC5A2 inhibitor is administered to the subject. The presence of an ANGPTL3 variant polypeptide and an SLC5A2 variant polypeptide indicates the subject has a decreased risk of developing a kidney disease. In some embodiments, the subject has an ANGPTL3 variant polypeptide and an SLC5A2 variant polypeptide. In some embodiments, the subject does not have an ANGPTL3 variant polypeptide and an SLC5A2 variant polypeptide.

[0119] Detecting the presence or absence of an ANGPTL3 variant polypeptide and an SLC5A2 variant polypeptide in a biological sample from a subject and/or determining whether a subject has an ANGPTL3 variant polypeptide and an SLC5A2 variant polypeptide can be carried out by any of the methods described herein. In some embodiments, these methods can be carried out in vitro. In some embodiments, these methods can be carried out in situ. In some embodiments, these methods can be carried out in vivo. In any of these embodiments, the polypeptide can be present within a cell obtained from the subject.

[0120] Examples of kidney disease therapeutic agents that treat chronic kidney disease and/or diabetic kidney disease include, but are not limited to, erythropoietin, a diuretic (such as, for example, furosemide, bumetanide, ethacrynic acid, metolazone, and hydrochlorothiazide), a blood pressure medication, a phosphate binder, sodium bicarbonate, a cholesterol medication, and a gliflozin, or any combination thereof.

[0121] Examples of kidney disease therapeutic agents that treat or inhibit a kidney stone include, but are not limited to, potassium citrate, a diuretic (such as, for example, furosemide, bumetanide, ethacrynic acid, metolazone, and hydrochlorothiazide), allopurinol, acetohydroxamic acid, tamsulosin, nifedipine, d-penicillamine, tiopronin, and mercaptopropionyl glycine, or any combination thereof.

[0122] Examples of kidney disease therapeutic agents that treat or inhibit chronic glomerulonephritis include, but are not limited to, an angiotensin-converting enzyme (ACE) inhibitor (such as, for example, lisinopril, enalapril, captopril, benazepril, fosinopril, and quinapril), a diuretic (such as, for example, furosemide, bumetanide, ethacrynic acid, metolazone, and hydrochlorothiazide), a calcium channel blocker (such as, for example, amlodipine, nifedipine, felodipine, isradipine, verapamil, and diltiazem), a beta-adrenergic blocker (such as, for example, metoprolol, bisoprolol, esmolol, atenolol, propranolol, sotalol, labetalol, pindolol, and penbutolol), an alpha-adrenergic agonist (such as, for example, clonidine, tizanidine, and dexmedetomidine), a corticosteroid (such as, for example, prednisone), and an immunosuppressant (such as, for example, cyclosphosphamide), or any combination thereof.

[0123] Examples of kidney disease therapeutic agents that treat or inhibit nephronophthisis include, but are not limited to, erythropoietin and a blood pressure medication, or any combination thereof.

[0124] Examples of kidney disease therapeutic agents that treat or inhibit chronic interstitial nephritis include, but are not limited to, a corticosteroid, erythropoietin, a blood pressure medication, a statin, and a chelating agent (such as, for example, succimer and edetate calcium disodium), or a combination thereof.

[0125] Examples of kidney disease therapeutic agents that treat or inhibit nephrosclerosis include, but are not limited to, a diuretic (such as, for example, furosemide, bumetanide, ethacrynic acid, metolazone, and hydrochlorothiazide), an ACE inhibitor (such as, for example, lisinopril, enalapril, captopril, benazepril, fosinopril, and quinapril), an ARB (such as, for example, losartan, and valsartan), a calcium channel blocker (such as, for example, amlodipine, nifedipine, felodipine, isradipine, verapamil, and diltiazem), a beta-adrenergic blocker (such as, for example, metoprolol, bisoprolol, esmolol, atenolol, propranolol, sotalol, labetalol, pindolol, and penbutolol), an alpha-adrenergic agonist (such as, for example, clonidine, tizanidine, and dexmedetomidine), a renin inhibitor (such as, for example, aliskiren), a vasodilator (such as, for example, minoxidil and hydralazine), and an alpha-1 blocker (such as, for example, doxazosin), or any combination thereof.

[0126] In some embodiments, the dose of the kidney disease therapeutic agents can be decreased by about 10%, by about 20%, by about 30%, by about 40%, by about 50%, by about 60%, by about 70%, by about 80%, or by about 90% for subjects that are ANGPTL3 reference or heterozygous for an ANGPTL3 variant nucleic acid molecule and that are SLC5A2 reference or heterozygous for an SLC5A2 variant nucleic acid molecule compared to subjects that are homozygous for an ANGPTL3 variant nucleic acid molecule and homozygous for an ANGPTL3 variant nucleic acid molecule. In some embodiments, the dose of the kidney disease therapeutic agents can be decreased by about 10%, by about 20%, by about 30%, by about 40%, or by about 50%. In addition, the subjects that are ANGPTL3 reference or heterozygous for an ANGPTL3 variant nucleic acid molecule and that are SLC5A2 reference or heterozygous for an SLC5A2 variant nucleic acid molecule can be administered less frequently compared to subjects that are homozygous for an ANGPTL3 variant nucleic acid molecule and homozygous for an ANGPTL3 variant nucleic acid molecule.

[0127] Administration of the kidney disease therapeutic agents, ANGPTL3 inhibitors, and/or SLC5A2 inhibitors can be repeated, for example, after one day, two days, three days, five days, one week, two weeks, three weeks, one month, five weeks, six weeks, seven weeks, eight weeks, two months, or three months. The repeated administration can be at the same dose or at a different dose. The administration can be repeated once, twice, three times, four times, five times, six times, seven times, eight times, nine times, ten times, or more. For example, according to certain dosage regimens a subject can receive therapy for a prolonged period of time such as, for example, 6 months, 1 year, or more.

[0128] Administration of the kidney disease therapeutic agents, ANGPTL3 inhibitors, and/or SLC5A2 inhibitors can occur by any suitable route including, but not limited to, parenteral, intravenous, oral, subcutaneous, intra-arterial, intracranial, intrathecal, intraperitoneal, topical, intranasal, or intramuscular. Pharmaceutical compositions for administration are desirably sterile and substantially isotonic and manufactured under GMP conditions. Pharmaceutical compositions can be provided in unit dosage form (i.e., the dosage for a single administration). Pharmaceutical compositions can be formulated using one or more physiologically and pharmaceutically acceptable carriers, diluents, excipients or auxiliaries. The formulation depends on the route of administration chosen. The term “pharmaceutically acceptable” means that the carrier, diluent, excipient, or auxiliary is compatible with the other ingredients of the formulation and not substantially deleterious to the recipient thereof.

[0129] The terms “treat”, “treating”, and “treatment” and “prevent”, “preventing”, and “prevention” as used herein, refer to eliciting the desired biological response, such as a therapeutic and prophylactic effect, respectively. In some embodiments, a therapeutic effect comprises one or more of a decrease/reduction in a kidney disease, a decrease/reduction in the severity of a kidney disease (such as, for example, a reduction or inhibition of development of a kidney disease), a decrease/reduction in symptoms and kidney disease-related effects, delaying the onset of symptoms and kidney disease-related effects, reducing the severity of symptoms of kidney disease-related effects, reducing the number of symptoms and kidney disease-related effects, reducing the latency of symptoms and kidney disease-related effects, an amelioration of symptoms and kidney disease-related effects, reducing secondary symptoms, reducing secondary infections, preventing relapse to a kidney disease, decreasing the number or frequency of relapse episodes, increasing latency between symptomatic episodes, increasing time to sustained progression, speeding recovery, or increasing efficacy of or decreasing resistance to alternative therapeutics, and/or an increased survival time of the affected host animal, following administration of the agent or composition comprising the agent. A prophylactic effect may comprise a complete or partial avoidance/inhibition or a delay of a kidney disease development/progression (such as, for example, a complete or partial avoidance/inhibition or a delay), and an increased survival time of the affected host animal, following administration of a therapeutic protocol. Treatment of a kidney disease encompasses the treatment of a subject already diagnosed as having any form of a kidney disease at any clinical stage or manifestation, the delay of the onset or evolution or aggravation or deterioration of the symptoms or signs of a kidney disease, and/or preventing and/or reducing the severity of a kidney disease.

[0130] The present disclosure also provides methods of identifying a subject having an increased risk of developing a kidney disease. The methods comprise determining or having determined the presence or absence of an ANGPTL3 variant nucleic acid molecule and determining or having determined the presence or absence of an SLC5A2 variant nucleic acid molecule in a biological sample obtained from the subject. When the subject is ANGPTL3 reference and SLC5A2 reference, then the subject has an increased risk of developing a kidney disease. When the subject is heterozygous or homozygous for the ANGPTL3 variant nucleic acid molecule and heterozygous or homozygous for the SLC5A2 variant nucleic acid molecule, or when the subject is heterozygous for one of the ANGPTL3 variant nucleic acid molecule and the SLC5A2 variant nucleic acid molecule and reference for the other of the ANGPTL3 variant nucleic acid molecule and the SLC5A2 variant nucleic acid molecule, then the subject has a decreased risk of developing a kidney disease.

[0131] In some embodiments, the kidney disease is chronic kidney disease. In some embodiments, the kidney disease is diabetic kidney disease. In some embodiments, the kidney disease is a kidney stone. In some embodiments, the kidney disease is chronic glomerulonephritis. In some embodiments, the kidney disease is nephronophthisis. In some embodiments, the kidney disease is chronic interstitial nephritis. In some embodiments, the kidney disease is nephrosclerosis.

[0132] In some embodiments, the ANGPTL3 variant nucleic acid molecule is a missense variant, a splice-site variant, a stop-gain variant, a start-loss variant, a stop-loss variant, a frameshift variant, an in-frame indel variant, or a variant that encodes a truncated ANGPTL3 polypeptide. In some embodiments, the ANGPTL3 variant nucleic acid molecule is any of the ANGPTL3 variant nucleic acid molecules described herein.

[0133] In some embodiment, the SLC5A2 variant nucleic acid molecule is a missense variant, a splice-site variant, a stop-gain variant, a start-loss variant, a stop-loss variant, a frameshift variant, an in-frame indel variant, or a variant that encodes a truncated SLC5A2 polypeptide. In some embodiments, the SLC5A2 variant nucleic acid molecule is any of the SLC5A2 variant nucleic acid molecules described herein.

[0134] Having a single copy of an ANGPTL3 variant nucleic acid molecule and a single copy of an SLC5A2 variant nucleic acid molecule is more protective of a subject from developing a kidney disease than having no copies of an ANGPTL3 variant nucleic acid molecule and no copies of an SLC5A2 variant nucleic acid molecule. Without intending to be limited to any particular theory or mechanism of action, it is believed that a single copy of an ANGPTL3 variant nucleic acid molecule and a single copy of an SLC5A2 variant nucleic acid molecule an SLC5A2 variant nucleic acid molecule (i.e., heterozygous for an ANGPTL3 variant nucleic acid molecule and an SLC5A2 variant nucleic acid molecule, or heterozygous for one of the ANGPTL3 variant nucleic acid molecule and the SLC5A2 variant nucleic acid molecule and reference for the other of the ANGPTL3 variant nucleic acid molecule and the SLC5A2 variant nucleic acid molecule) is protective of a subject from developing a kidney disease, and it is also believed that having two copies of an ANGPTL3 variant nucleic acid molecule and two copies of an SLC5A2 variant nucleic acid molecule (i.e., homozygous for an ANGPTL3 variant nucleic acid molecule and an SLC5A2 variant nucleic acid molecule) may be more protective of a subject from developing a kidney disease, relative to a subject with a single copy of each. Thus, in some embodiments, a single copy of an ANGPTL3 variant nucleic acid molecule and a single copy of an SLC5A2 variant nucleic acid molecule may not be completely protective, but instead, may be partially or incompletely protective of a subject from developing a kidney disease. While not desiring to be bound by any particular theory, there may be additional factors or molecules involved in the development of a kidney disease that are still present in a subject having a single copy of an ANGPTL3 variant nucleic acid molecule and a single copy of an SLC5A2 variant nucleic acid molecule, thus resulting in less than complete protection from the development of a kidney disease.

[0135] Determining whether a subject has an ANGPTL3 variant nucleic acid molecule and an SLC5A2 variant nucleic acid molecule in a biological sample from a subject and/or determining whether a subject has an ANGPTL3 variant nucleic acid molecule an SLC5A2 variant nucleic acid molecule can be carried out by any of the methods described herein. In some embodiments, these methods can be carried out in vitro. In some embodiments, these methods can be carried out in situ. In some embodiments, these methods can be carried out in vivo. In any of these embodiments, the nucleic acid molecule can be present within a cell obtained from the subject.

[0136] In some embodiments, the methods further comprising administering a kidney disease therapeutic agent and/or an ANGPTL3 inhibitor and an SLC5A2 inhibitor to a subject that is: i) ANGPTL3 reference or heterozygous for the ANGPTL3 variant nucleic acid molecule, and ii) SLC5A2 reference or heterozygous for the SLC5A2 variant nucleic acid molecule. In some embodiments, the ANGPTL3 inhibitor and the SLC5A2 inhibitor comprises any of the inhibitors described herein. In some embodiments, the ANGPTL3 inhibitor comprises an inhibitory nucleic acid molecule that hybridizes to an ANGPTL3 nucleic acid molecule. In some embodiments, the inhibitory nucleic acid molecule comprises an antisense nucleic acid molecule, an siRNA, or an shRNA. In some embodiments, the inhibitory nucleic acid molecule comprises an antisense nucleic acid molecule. In some embodiments, the inhibitory nucleic acid molecule comprises an siRNA. In some embodiments, the ANGPTL3 inhibitor comprises a small molecule. In some embodiments, the ANGPTL3 inhibitor comprises an antibody. In some embodiments, the antibody comprises evinacumab. In some embodiments, the SLC5A2 inhibitor comprises an inhibitory nucleic acid molecule that hybridizes to a SLC5A2 nucleic acid molecule. In some embodiments, the inhibitory nucleic acid molecule comprises an antisense nucleic acid molecule, an siRNA, or an shRNA. In some embodiments, the inhibitory nucleic acid molecule comprises an antisense nucleic acid molecule. In some embodiments, the inhibitory nucleic acid molecule comprises an siRNA. In some embodiments, the SLC5A2 inhibitor comprises canagliflozin, dapagliflozin, empagliflozin, ipragliflozin, luseogliflozin, or tofogliflozin, or any combination thereof.

[0137] The present disclosure also provides methods of determining a subject's aggregate burden, or polygenic risk score (PRS), of having two or more ANGPTL3 and SLC5A2 variant nucleic acid molecules, and/or two or more ANGPTL3 and SLC5A2 variant polypeptides associated with a decreased risk of developing a kidney disease. The aggregate burden is the sum of two or more genetic variants that can be carried out in an association analysis with a kidney disease. In some embodiments, the subject is homozygous for one or more ANGPTL3 and SLC5A2 variant nucleic acid molecules associated with a decreased risk of developing a kidney disease. In some embodiments, the subject is heterozygous for one or more ANGPTL3 and SLC5A2 variant nucleic acid molecules associated with a decreased risk of developing a kidney disease. In some embodiments, the subject is heterozygous for one of the ANGPTL3 variant nucleic acid molecule and the SLC5A2 variant nucleic acid molecule and reference for the other of the ANGPTL3 variant nucleic acid molecule and the SLC5A2 variant nucleic acid molecule. When the subject has a lower aggregate burden, the subject has an increased risk of developing a kidney disease, and the subject is administered or continued to be administered the kidney disease therapeutic agent and/or an ANGPTL3 inhibitor and SLC5A2 inhibitor. When the subject has a higher aggregate burden, the subject has a decreased risk of developing a kidney disease and the subject is administered or continued to be administered the kidney disease therapeutic agent. The higher the aggregate burden, the lower the risk of developing a kidney disease.

[0138] In some embodiments, a subject's aggregate burden of having any two or more ANGPTL3 and SLC5A2 variant nucleic acid molecules represents a weighted sum of a plurality of any of the ANGPTL3 and SLC5A2 variant nucleic acid molecules. In some embodiments, the aggregate burden is calculated using at least about 2, at least about 3, at least about 4, at least about 5, at least about 10, at least about 20, at least about 30, at least about 40, at least about 50, at least about 60, at least about 70, at least about 80, at least about 100, at least about 120, at least about 150, at least about 200, at least about 250, at least about 300, at least about 400, at least about 500, at least about 1,000, at least about 10,000, at least about 100,000, or at least about or more than 1,000,000 genetic variants present in or around (up to 10 Mb) the ANGPTL3 gene and SLC5A2 gene, where the genetic burden is the number of alleles multiplied by the association estimate with a kidney disease or related outcome for each allele (e.g., a weighted polygenic burden score). In some embodiments, when the subject has an aggregate burden higher than a desired threshold score, the subject has a decreased risk of developing a kidney disease. In some embodiments, when the subject has an aggregate burden lower than a desired threshold score, the subject has an increased risk of developing a kidney disease.

[0139] In some embodiments, the aggregate burden may be divided into quintiles, e.g., top quintile, second quintile, intermediate quintile, fourth quintile, and bottom quintile, wherein the top quintile of aggregate burden corresponds to the lowest risk group and the bottom quintile of aggregate burden corresponds to the highest risk group. In some embodiments, a subject having a higher aggregate burden comprises the highest weighted aggregate burdens, including, but not limited to the top 10%, top 20%, top 30%, top 40%, or top 50% of aggregate burdens from a subject population. In some embodiments, the genetic variants comprise the genetic variants having association with a kidney disease in the top 10%, top 20%, top 30%, top 40%, or top 50% of p-value range for the association. In some embodiments, each of the identified genetic variants comprise the genetic variants having association with a kidney disease with p-value of no more than about 10⁻², about 10⁻³, about 10⁻⁴, about 10⁻⁵, about 10⁻⁶, about 10⁻⁷, about 10⁻⁸, about 10⁻⁹, about 10⁻¹⁰, about 10⁻¹¹, about 10⁻¹², about 10⁻¹³, about 10⁻¹⁴, about or 10⁻¹⁵. In some embodiments, the identified genetic variants comprise the genetic variants having association with a kidney disease with p-value of less than 5×10⁻⁸. In some embodiments, the identified genetic variants comprise genetic variants having association with a kidney disease in high-risk subjects as compared to the rest of the reference population with odds ratio (OR) about 1.5 or greater, about 1.75 or greater, about 2.0 or greater, or about 2.25 or greater for the top 20% of the distribution; or about 1.5 or greater, about 1.75 or greater, about 2.0 or greater, about 2.25 or greater, about 2.5 or greater, or about 2.75 or greater. In some embodiments, the odds ratio (OR) may range from about 1.0 to about 1.5, from about 1.5 to about 2.0, from about 2.0 to about 2.5, from about 2.5 to about 3.0, from about 3.0 to about 3.5, from about 3.5 to about 4.0, from about 4.0 to about 4.5, from about 4.5 to about 5.0, from about 5.0 to about 5.5, from about 5.5 to about 6.0, from about 6.0 to about 6.5, from about 6.5 to about 7.0, or greater than 7.0. In some embodiments, high-risk subjects have aggregate burdens in the bottom decile, quintile, or tertile in a reference population. The threshold of the aggregate burden can be determined on the basis of the nature of the intended practical application and the risk difference that would be considered meaningful for that practical application.

[0140] The present disclosure also provides methods of detecting the presence or absence of ANGPTL3 and SLC5A2 variant nucleic acid molecule (i.e., a genomic nucleic acid molecule, an mRNA molecule, or a cDNA molecule produced from an mRNA molecule) in a biological sample from a subject. It is understood that gene sequences within a population and mRNA molecules encoded by such genes can vary due to polymorphisms such as single-nucleotide polymorphisms.

[0141] The biological sample can be derived from any cell, tissue, or biological fluid from the subject. The biological sample may comprise any clinically relevant tissue, such as a bone marrow sample, a tumor biopsy, a fine needle aspirate, or a sample of bodily fluid, such as blood, gingival crevicular fluid, plasma, serum, lymph, ascitic fluid, cystic fluid, or urine. In some cases, the sample comprises a buccal swab. The biological sample used in the methods disclosed herein can vary based on the assay format, nature of the detection method, and the tissues, cells, or extracts that are used as the sample. A biological sample can be processed differently depending on the assay being employed. For example, when detecting any ANGPTL3 and SLC5A2 variant nucleic acid molecule, preliminary processing designed to isolate or enrich the biological sample for the genomic DNA can be employed. A variety of techniques may be used for this purpose. When detecting the level of any ANGPTL3 and SLC5A2 variant nucleic acid molecule, different techniques can be used enrich the biological sample with mRNA molecules. Various methods to detect the presence or level of an mRNA molecule or the presence of a particular variant genomic DNA locus can be used.

[0142] In some embodiments, detecting an ANGPTL3 and an SLC5A2 variant nucleic acid molecule in a subject comprises performing a sequence analysis on a biological sample obtained from the subject to determine whether an ANGPTL3 and an SLC5A2 genomic nucleic acid molecule in the biological sample, and/or an ANGPTL3 and an SLC5A2 mRNA molecule in the biological sample, and/or an ANGPTL3 and an SLC5A2 cDNA molecule produced from an mRNA molecule in the biological sample, is present in the sample. In some embodiments, the methods detect the ANGPTL3 and SLC5A2 variant genomic nucleic acid molecule that comprises any of the the genetic variants described herein, or an mRNA molecule produced therefrom, or a cDNA molecule produced from the mRNA molecule.

[0143] In some embodiments, the methods of detecting the presence or absence of an ANGPTL3 and an SLC5A2 variant nucleic acid molecule (such as, for example, a genomic nucleic acid molecule, an mRNA molecule, and/or a cDNA molecule produced from an mRNA molecule) in a subject comprise performing an assay on a biological sample obtained from the subject. The assay determines whether a nucleic acid molecule in the biological sample comprises a particular nucleotide sequence.

[0144] In some embodiments, the biological sample comprises a cell or cell lysate. Such methods can further comprise, for example, obtaining a biological sample from the subject comprising an ANGPTL3 and an SLC5A2 genomic nucleic acid molecule or mRNA molecule, and if mRNA, optionally reverse transcribing the mRNA into cDNA. Such assays can comprise, for example determining the identity of these positions of the particular ANGPTL3 and SLC5A2 nucleic acid molecules. In some embodiments, the method is an in vitro method.

[0145] In some embodiments, the determining step, detecting step, or sequence analysis comprises sequencing at least a portion of the nucleotide sequence of the ANGPTL3 and SLC5A2 genomic nucleic acid molecule, the ANGPTL3 and SLC5A2 mRNA molecule, or the ANGPTL3 and SLC5A2 cDNA molecule in the biological sample that comprises a genetic variation compared to the corresponding ANGPTL3 and SLC5A2 reference molecule. In some embodiments, the sequenced portion comprises one or more variations that cause a loss-of-function (partial or complete) or are predicted to cause a loss-of-function (partial or complete).

[0146] In some embodiments, the assay comprises sequencing the entire nucleic acid molecule. In some embodiments, only an ANGPTL3 and an SLC5A2 genomic nucleic acid molecule is analyzed. In some embodiments, only an ANGPTL3 and an SLC5A2 mRNA is analyzed. In some embodiments, only an ANGPTL3 and an SLC5A2 cDNA obtained from the ANGPTL3 and SLC5A2 mRNA is analyzed.

[0147] Alteration-specific polymerase chain reaction techniques can be used to detect mutations such as SNPs in a nucleic acid sequence. Alteration-specific primers can be used because the DNA polymerase will not extend when a mismatch with the template is present.

[0148] In some embodiments, the nucleic acid molecule in the sample is mRNA and the mRNA is reverse-transcribed into a cDNA prior to the amplifying step. In some embodiments, the nucleic acid molecule is present within a cell obtained from the subject.

[0149] In some embodiments, the assay comprises contacting the biological sample with a primer or probe, such as an alteration-specific primer or alteration-specific probe, that specifically hybridizes to an ANGPTL3 and an SLC5A2 variant genomic sequence, variant mRNA sequence, or variant cDNA sequence and not the corresponding ANGPTL3 and SLC5A2 reference sequence under stringent conditions and determining whether hybridization has occurred.

[0150] In some embodiments, the determining step, detecting step, or sequence analysis comprises: a) amplifying at least a portion of the ANGPTL3 and SLC5A2 nucleic acid molecule that encodes the ANGPTL3 and SLC5A2 polypeptide; b) labeling the amplified nucleic acid molecule with a detectable label; c) contacting the labeled nucleic acid molecule with a support comprising an alteration-specific probe; and d) detecting the detectable label.

[0151] In some embodiments, the assay comprises RNA sequencing (RNA-Seq). In some embodiments, the assays also comprise reverse transcribing mRNA into cDNA, such as by the reverse transcriptase polymerase chain reaction (RT-PCR).

[0152] In some embodiments, the methods utilize probes and primers of sufficient nucleotide length to bind to the target nucleotide sequence and specifically detect and/or identify a polynucleotide comprising an ANGPTL3 and an SLC5A2 variant genomic nucleic acid molecule, variant mRNA molecule, or variant cDNA molecule. The hybridization conditions or reaction conditions can be determined by the operator to achieve this result. The nucleotide length may be any length that is sufficient for use in a detection method of choice, including any assay described or exemplified herein. Such probes and primers can hybridize specifically to a target nucleotide sequence under high stringency hybridization conditions. Probes and primers may have complete nucleotide sequence identity of contiguous nucleotides within the target nucleotide sequence, although probes differing from the target nucleotide sequence and that retain the ability to specifically detect and/or identify a target nucleotide sequence may be designed by conventional methods. Probes and primers can have about 80%, about 85%, about 90%, about 91%, about 92%, about 93%, about 94%, about 95%, about 96%, about 97%, about 98%, about 99%, or 100% sequence identity or complementarity with the nucleotide sequence of the target nucleic acid molecule.

[0153] Illustrative examples of nucleic acid sequencing techniques include, but are not limited to, chain terminator (Sanger) sequencing and dye terminator sequencing. Other methods involve nucleic acid hybridization methods other than sequencing, including using labeled primers or probes directed against purified DNA, amplified DNA, and fixed cell preparations (fluorescence in situ hybridization (FISH)). In some methods, a target nucleic acid molecule may be amplified prior to or simultaneous with detection. Illustrative examples of nucleic acid amplification techniques include, but are not limited to, polymerase chain reaction (PCR), ligase chain reaction (LCR), strand displacement amplification (SDA), and nucleic acid sequence based amplification (NASBA). Other methods include, but are not limited to, ligase chain reaction, strand displacement amplification, and thermophilic SDA (tSDA).

[0154] In hybridization techniques, stringent conditions can be employed such that a probe or primer will specifically hybridize to its target. In some embodiments, a polynucleotide primer or probe under stringent conditions will hybridize to its target sequence to a detectably greater degree than to other non-target sequences, such as, at least 2-fold, at least 3-fold, at least 4-fold, or more over background, including over 10-fold over background. In some embodiments, a polynucleotide primer or probe under stringent conditions will hybridize to its target nucleotide sequence to a detectably greater degree than to other nucleotide sequences by at least 2-fold. In some embodiments, a polynucleotide primer or probe under stringent conditions will hybridize to its target nucleotide sequence to a detectably greater degree than to other nucleotide sequences by at least 3-fold. In some embodiments, a polynucleotide primer or probe under stringent conditions will hybridize to its target nucleotide sequence to a detectably greater degree than to other nucleotide sequences by at least 4-fold. In some embodiments, a polynucleotide primer or probe under stringent conditions will hybridize to its target nucleotide sequence to a detectably greater degree than to other nucleotide sequences by over 10-fold over background. Stringent conditions are sequence-dependent and will be different in different circumstances.

[0155] Appropriate stringency conditions which promote DNA hybridization, for example, 6× sodium chloride/sodium citrate (SSC) at about 45° C., followed by a wash of 2×SSC at 50° C., are known or can be found in Current Protocols in Molecular Biology, John Wiley & Sons, N.Y. (1989), 6.3.1-6.3.6. Typically, stringent conditions for hybridization and detection will be those in which the salt concentration is less than about 1.5 M Na⁺ ion, typically about 0.01 to 1.0 M Na⁺ ion concentration (or other salts) at pH 7.0 to 8.3 and the temperature is at least about 30° C. for short probes (such as, for example, 10 to 50 nucleotides) and at least about 60° C. for longer probes (such as, for example, greater than 50 nucleotides). Stringent conditions may also be achieved with the addition of destabilizing agents such as formamide. Optionally, wash buffers may comprise about 0.1% to about 1% SDS. Duration of hybridization is generally less than about 24 hours, usually about 4 to about 12 hours. The duration of the wash time will be at least a length of time sufficient to reach equilibrium.

[0156] In some embodiments, such isolated nucleic acid molecules comprise or consist of at least about 5, at least about 8, at least about 10, at least about 11, at least about 12, at least about 13, at least about 14, at least about 15, at least about 16, at least about 17, at least about 18, at least about 19, at least about 20, at least about 21, at least about 22, at least about 23, at least about 24, at least about 25, at least about 30, at least about 35, at least about 40, at least about 45, at least about 50, at least about 55, at least about 60, at least about 65, at least about 70, at least about 75, at least about 80, at least about 85, at least about 90, at least about 95, at least about 100, at least about 200, at least about 300, at least about 400, at least about 500, at least about 600, at least about 700, at least about 800, at least about 900, at least about 1000, at least about 2000, at least about 3000, at least about 4000, or at least about 5000 nucleotides. In some embodiments, such isolated nucleic acid molecules comprise or consist of at least about 5, at least about 8, at least about 10, at least about 11, at least about 12, at least about 13, at least about 14, at least about 15, at least about 16, at least about 17, at least about 18, at least about 19, at least about 20, at least about 21, at least about 22, at least about 23, at least about 24, or at least about 25 nucleotides. In some embodiments, the isolated nucleic acid molecules comprise or consist of at least about 18 nucleotides. In some embodiments, the isolated nucleic acid molecules comprise or consists of at least about 15 nucleotides. In some embodiments, the isolated nucleic acid molecules consist of or comprise from about 10 to about 35, from about 10 to about 30, from about 10 to about 25, from about 12 to about 30, from about 12 to about 28, from about 12 to about 24, from about 15 to about 30, from about 15 to about 25, from about 18 to about 30, from about 18 to about 25, from about 18 to about 24, or from about 18 to about 22 nucleotides. In some embodiments, the isolated nucleic acid molecules consist of or comprise from about 18 to about 30 nucleotides. In some embodiments, the isolated nucleic acid molecules comprise or consist of at least about 15 nucleotides to at least about 35 nucleotides.

[0157] In some embodiments, such isolated nucleic acid molecules hybridize to ANGPTL3 and SLC5A2 variant nucleic acid molecules (such as genomic nucleic acid molecules, mRNA molecules, and/or cDNA molecules) under stringent conditions. Such nucleic acid molecules can be used, for example, as probes, primers, alteration-specific probes, or alteration-specific primers as described or exemplified herein, and include, without limitation primers, probes, antisense RNAs, shRNAs, and siRNAs, each of which is described in more detail elsewhere herein and can be used in any of the methods described herein.

[0158] In some embodiments, the isolated nucleic acid molecules hybridize to at least about 15 contiguous nucleotides of a nucleic acid molecule that is at least about 70%, at least about 75%, at least about 80%, at least about 85%, at least about 90%, at least about 95%, at least about 96%, at least about 97%, at least about 98%, at least about 99%, or 100% identical to ANGPTL3 and SLC5A2 variant nucleic acid molecules. In some embodiments, the isolated nucleic acid molecules consist of or comprise from about 15 to about 100 nucleotides, or from about 15 to about 35 nucleotides. In some embodiments, the isolated nucleic acid molecules consist of or comprise from about 15 to about 100 nucleotides. In some embodiments, the isolated nucleic acid molecules consist of or comprise from about 15 to about 35 nucleotides.

[0159] In some embodiments, the alteration-specific probes and alteration-specific primers comprise DNA. In some embodiments, the alteration-specific probes and alteration-specific primers comprise RNA.

[0160] In some embodiments, the probes and primers described herein (including alteration-specific probes and alteration-specific primers) have a nucleotide sequence that specifically hybridizes to any of the nucleic acid molecules disclosed herein, or the complement thereof. In some embodiments, the probes and primers specifically hybridize to any of the nucleic acid molecules disclosed herein under stringent conditions.

[0161] In some embodiments, the primers, including alteration-specific primers, can be used in second generation sequencing or high throughput sequencing. In some instances, the primers, including alteration-specific primers, can be modified. In particular, the primers can comprise various modifications that are used at different steps of, for example, Massive Parallel Signature Sequencing (MPSS), Polony sequencing, and 454 Pyrosequencing. Modified primers can be used at several steps of the process, including biotinylated primers in the cloning step and fluorescently labeled primers used at the bead loading step and detection step. Polony sequencing is generally performed using a paired-end tags library wherein each molecule of DNA template is about 135 bp in length. Biotinylated primers are used at the bead loading step and emulsion PCR. Fluorescently labeled degenerate nonamer oligonucleotides are used at the detection step. An adaptor can contain a 5′-biotin tag for immobilization of the DNA library onto streptavidin-coated beads.

[0162] The probes and primers described herein can be used to detect a nucleotide variation within any of the ANGPTL3 and SLC5A2 variant nucleic acid molecules disclosed herein. The primers described herein can be used to amplify any ANGPTL3 and SLC5A2 variant nucleic acid molecule, or a fragment thereof.

[0163] In the context of the disclosure “specifically hybridizes” means that the probe or primer (such as, for example, the alteration-specific probe or alteration-specific primer) does not hybridize to a nucleic acid sequence encoding an ANGPTL3 and an SLC5A2 reference genomic nucleic acid molecule, an ANGPTL3 and an SLC5A2 reference mRNA molecule, and/or an ANGPTL3 and an SLC5A2 reference cDNA molecule.

[0164] In some embodiments, the probes (such as, for example, an alteration-specific probe) comprise a label. In some embodiments, the label is a fluorescent label, a radiolabel, or biotin.

[0165] The present disclosure also provides supports comprising a substrate to which any one or more of the probes disclosed herein is attached. Solid supports are solid-state substrates or supports with which molecules, such as any of the probes disclosed herein, can be associated. A form of solid support is an array. Another form of solid support is an array detector. An array detector is a solid support to which multiple different probes have been coupled in an array, grid, or other organized pattern. A form for a solid-state substrate is a microtiter dish, such as a standard 96-well type. In some embodiments, a multiwell glass slide can be employed that normally contains one array per well.

[0166] The genomic nucleic acid molecules, mRNA molecules, and cDNA molecules can be from any organism. For example, the genomic nucleic acid molecules, mRNA molecules, and cDNA molecules can be human or an ortholog from another organism, such as a non-human mammal, a rodent, a mouse, or a rat. It is understood that gene sequences within a population can vary due to polymorphisms such as single-nucleotide polymorphisms.

[0167] Also provided herein are functional polynucleotides that can interact with the disclosed nucleic acid molecules. Examples of functional polynucleotides include, but are not limited to, antisense molecules, aptamers, ribozymes, triplex forming molecules, and external guide sequences. The functional polynucleotides can act as effectors, inhibitors, modulators, and stimulators of a specific activity possessed by a target molecule, or the functional polynucleotides can possess a de novo activity independent of any other molecules.

[0168] The isolated nucleic acid molecules disclosed herein can comprise RNA, DNA, or both RNA and DNA. The isolated nucleic acid molecules can also be joined or fused to a heterologous nucleic acid sequence, such as in a vector, or a heterologous label. For example, the isolated nucleic acid molecules disclosed herein can be within a vector or as an exogenous donor sequence comprising the isolated nucleic acid molecule and a heterologous nucleic acid sequence. The isolated nucleic acid molecules can also be joined or fused to a heterologous label. The label can be directly detectable (such as, for example, fluorophore) or indirectly detectable (such as, for example, hapten, enzyme, or fluorophore quencher). Such labels can be detectable by spectroscopic, photochemical, biochemical, immunochemical, or chemical means. Such labels include, for example, radiolabels, pigments, dyes, chromogens, spin labels, and fluorescent labels. The label can also be, for example, a chemiluminescent substance; a metal-containing substance; or an enzyme, where there occurs an enzyme-dependent secondary generation of signal. The term “label” can also refer to a “tag” or hapten that can bind selectively to a conjugated molecule such that the conjugated molecule, when added subsequently along with a substrate, is used to generate a detectable signal. For example, biotin can be used as a tag along with an avidin or streptavidin conjugate of horseradish peroxidate (HRP) to bind to the tag, and examined using a calorimetric substrate (such as, for example, tetramethylbenzidine (TMB)) or a fluorogenic substrate to detect the presence of HRP. Exemplary labels that can be used as tags to facilitate purification include, but are not limited to, myc, HA, FLAG or 3×FLAG, 6×his or polyhistidine, glutathione-S-transferase (GST), maltose binding protein, an epitope tag, or the Fc portion of immunoglobulin. Numerous labels include, for example, particles, fluorophores, haptens, enzymes and their calorimetric, fluorogenic and chemiluminescent substrates and other labels.

[0169] Percent identity (or percent complementarity) between particular stretches of nucleotide sequences within nucleic acid molecules or amino acid sequences within polypeptides can be determined routinely using BLAST programs (basic local alignment search tools) and PowerBLAST programs (Altschul et al., J. Mol. Biol., 1990, 215, 403-410; Zhang and Madden, Genome Res., 1997, 7, 649-656) or by using the Gap program (Wisconsin Sequence Analysis Package, Version 8 for Unix, Genetics Computer Group, University Research Park, Madison Wis.), using default settings, which uses the algorithm of Smith and Waterman (Adv. Appl. Math., 1981, 2, 482-489). Herein, if reference is made to percent sequence identity, the higher percentages of sequence identity are preferred over the lower ones.

[0170] The present disclosure also provides kidney disease therapeutic agents for use in the treatment or prevention of a kidney disease in a subject having an ANGPTL3 and an SLC5A2 variant nucleic acid molecule. Any of the kidney disease therapeutic agents described herein can be used herein. Any of the ANGPTL3 and SLC5A2 variant nucleic acid molecules disclosed herein can be used herein. In some embodiments, the ANGPTL3 and SLC5A2 variant nucleic acid molecule is a ANGPTL3 and SLC5A2 variant genomic nucleic acid molecule that comprises any of the genetic variants described herein, or is an mRNA molecule produced therefrom, or is a cDNA molecule produced from the mRNA molecule.

[0171] The present disclosure also provides uses of kidney disease therapeutic agents for use in the preparation of a medicament for treating or preventing a kidney disease in a subject having an ANGPTL3 and an SLC5A2 variant nucleic acid molecule. Any of the kidney disease therapeutic agents described herein can be used herein. Any of the ANGPTL3 and SLC5A2 variant nucleic acid molecules disclosed herein can be used herein. In some embodiments, the ANGPTL3 and SLC5A2 variant nucleic acid molecule is a ANGPTL3 and SLC5A2 variant genomic nucleic acid molecule that comprises any of the genetic variants described herein, or is an mRNA molecule produced therefrom, or is a cDNA molecule produced from the mRNA molecule.

[0172] The present disclosure also provides ANGPTL3 and SLC5A2 inhibitors for use in the treatment or prevention of a kidney disease in a subject that is ANGPTL3 and SLC5A2 reference or is heterozygous for an ANGPTL3 and an SLC5A2 variant nucleic acid molecule or is heterozygous for one of the ANGPTL3 variant nucleic acid molecule and the SLC5A2 variant nucleic acid molecule and reference for the other of the ANGPTL3 variant nucleic acid molecule and the SLC5A2 variant nucleic acid molecule. Any of the ANGPTL3 and SLC5A2 inhibitors described herein can be used herein. Any of the ANGPTL3 and SLC5A2 variant nucleic acid molecules disclosed herein can be used herein. In some embodiments, the ANGPTL3 and SLC5A2 variant nucleic acid molecule is an ANGPTL3 and an SLC5A2 variant genomic nucleic acid molecule that comprises any of the genetic variants described herein, or is an mRNA molecule produced therefrom, or is a cDNA molecule produced from the mRNA molecule.

[0173] The present disclosure also provides ANGPTL3 and SLC5A2 inhibitors in the preparation of a medicament for treating or preventing a kidney disease in a subject that is ANGPTL3 and SLC5A2 reference or is heterozygous for an ANGPTL3 and an SLC5A2 variant nucleic acid molecule or heterozygous for one of the ANGPTL3 variant nucleic acid molecule and the SLC5A2 variant nucleic acid molecule and reference for the other of the ANGPTL3 variant nucleic acid molecule and the SLC5A2 variant nucleic acid molecule. Any of the ANGPTL3 and SLC5A2 inhibitors described herein can be used herein. Any of the ANGPTL3 and SLC5A2 variant nucleic acid molecules disclosed herein can be used herein. In some embodiments, the ANGPTL3 and SLC5A2 variant nucleic acid molecule is an ANGPTL3 and an SLC5A2 variant genomic nucleic acid molecule that comprises any of the genetic variants described herein, or is an mRNA molecule produced therefrom, or is a cDNA molecule produced from the mRNA molecule.

[0174] In some embodiments, the ANGPTL3 and SLC5A2 inhibitors and the kidney disease therapeutic agent are disposed within a pharmaceutical composition. In some embodiments, the ANGPTL3 and SLC5A2 inhibitors are disposed within a first pharmaceutical composition and the kidney disease therapeutic agent is disposed within a second pharmaceutical composition. In some embodiments, the first pharmaceutical composition and the second pharmaceutical composition are administered simultaneously. In some embodiments, the first pharmaceutical composition is administered before the second pharmaceutical composition. In some embodiments, the first pharmaceutical composition is administered after the second pharmaceutical composition. Alternately, the ANGPTL3 inhibitor, the SLC5A2 inhibitor, and the kidney disease therapeutic agent are disposed in separate pharmaceutical compositions.

[0175] All patent documents, websites, other publications, accession numbers and the like cited above or below are incorporated by reference in their entirety for all purposes to the same extent as if each individual item were specifically and individually indicated to be so incorporated by reference. If different versions of a sequence are associated with an accession number at different times, the version associated with the accession number at the effective filing date of this application is meant. The effective filing date means the earlier of the actual filing date or filing date of a priority application referring to the accession number if applicable. Likewise, if different versions of a publication, website or the like are published at different times, the version most recently published at the effective filing date of the application is meant unless otherwise indicated. Any feature, step, element, embodiment, or aspect of the present disclosure can be used in combination with any other feature, step, element, embodiment, or aspect unless specifically indicated otherwise. Although the present disclosure has been described in some detail by way of illustration and example for purposes of clarity and understanding, it will be apparent that certain changes and modifications may be practiced within the scope of the appended claims.

[0176] The following examples are provided to describe the embodiments in greater detail. They are intended to illustrate, not to limit, the claimed embodiments. The following examples provide those of ordinary skill in the art with a disclosure and description of how the compounds, compositions, articles, devices and/or methods described herein are made and evaluated, and are intended to be purely exemplary and are not intended to limit the scope of any claims. Efforts have been made to ensure accuracy with respect to numbers (such as, for example, amounts, temperature, etc.), but some errors and deviations may be accounted for. Unless indicated otherwise, parts are parts by weight, temperature is in ° C. or is at ambient temperature, and pressure is at or near atmospheric.

### EXAMPLES

### Example 1: Loss-of-Function of ANGPTL3 is Associated with Improved Kidney Function Independently of SLC5A2

[0177] To determine if ANGPTL3 effects on chronic kidney disease are affected by SGLT2 function, exome sequencing was performed in up to 677,048 participants across five studies to identify rare coding mutations. We estimated associations for eGFR with the burden of identified rare loss-of-function and missense variants in ANGPTL3 with and without adjustment for the burden of rare loss-of-function and missense variants in SLC5A2, the gene encoding SGLT2. eGFR is a widely used biomarker of kidney function in which higher levels indicate better function.

[0178] In the analysis, the burden of rare (alternative allele frequency (AAF)<0.1%) predicted loss-of-function (pLOF) or missense genetic variants in ANGPTL3 was strongly associated with increased eGFR (Table 1). Importantly, the burden of pLOF or missense genetic variants in ANGPTL3 had a similar effect on increased eGFR after adjustment for rare loss-of-function and missense variants in SLC5A2 (AAF<0.1%), indicating that the two genes act independently of each other to increase eGFR.

TABLE 1
Associations with increased eGFR levels for the
burden of rare (AAF < 0.1%) pLOF or
missense variants in the ANGPTL3 gene (outcome = eGFR)

| | | Effect per | | | |
|---|---|---|---|---|---|
| Genetic | SLC5A2 | allele | | Allele counts | |
| exposure | adjustment | (95% CI) | Pval | (Ref\|Het\|Hom) | AAF |
| ANGPTL3 | Unadjusted | 0.04 (0.01, | 0.0031 | 651,141\| | 0.00226 |
| pLOF | | 0.07) SD | | 2,950\|5 | |
| or 5/5 | | 0.72 (0.24, | | | |
| missense | | 1.20) | | | |
| variants | | mL/min | | | |
| ANGPTL3 | SLC5A2 pLOF | 0.04 (0.02, | 0.0018 | 651,141\| | 0.00226 |
| pLOF | Adjusted for | 0.07) SD | | 2,950\|5 | |
| or 5/5 | or 5/5 | 0.77 (0.29, | | | |
| missense | missense | 1.24) | | | |
| variants | variant carrier | mL/min | | | |
| | status | | | | |

Abbreviations: CI, confidence interval; SD, standard deviation; mL/min, milliliters per minute; AAF, alternative allele frequency; Ref, homozygous reference genotype; Het, heterozygous carrier of rare pLOF or 5/5 missense variant in ANGPTL3; Hom, homozygous carrier of rare pLOF or 5/5 missense variant in ANGPTL3; pLOF, predicted loss of function; 5/5 missense, missense variant predicted to be deleterious by 5 out of 5 in silico prediction algorithms; eGFR, estimated glomerular filtration rate.

[0179] Similar results with increased were observed comparing the association for rare ANGPTL3 pLOF variants alone (AAF<1%, excluding missense variants) with and without adjustment for SLC5A2 pLOF variants (see, Table 2), indicating that the association for rare pLOF plus missense variants reflects a loss-of-function in ANGPTL3 that is independent of the effects of loss-of-function in SLC5A2.

TABLE 2
Associations with increased eGFR levels for the burden of rare
(AAF < 1%) pLOF variants in the ANGPTL3 gene (outcome = eGFR)

| | | Effect per | | Genotype | |
|---|---|---|---|---|---|
| Genetic | SLC5A2 | allele | | counts, | |
| exposure | adjustment | (95% CI) | Pval | Ref\|Het\|Hom | AAF |
| ANGPTL3 | Unadjusted | 0.05 (0.01, | 0.014 | 675,519\| | 0.00113 |
| pLOF | | 0.09) SD | | 1,528\|1 | |
| variants | | 0.86 (0.18, | | | |
| | | 1.54) mL/min | | | |
| ANGPTL3 | Adjusted for | 0.05 (0.01, | 0.010 | 675,519\| | 0.00113 |
| pLOF | SLC5A2 | 0.09) SD | | 1,528\|1 | |
| variants | pLOF variant | 0.89 (0.21, | | | |
| | carrier status | 1.57) mL/min | | | |

Abbreviations: CI, confidence interval; SD, standard deviation; mL/min, milliliters per minute; AAF, alternative allele frequency; Ref, homozygous reference genotype; Het, heterozygous carrier of rare pLOF variant in ANGPTL3; Hom, homozygous carrier of rare pLOF variant in ANGPTL3; pLOF, predicted loss of function; eGFR, estimated glomerular filtration rate.

### Example 2: Loss-of-Function of SLC5A2 is Associated with Improved Kidney Function Independently of ANGPTL3

[0180] We next compared the association for rare coding variants in SLC5A2 with increased eGFR, with and without adjustment for rare coding variants in ANGPTL3. The burden of pLOF or missense genetic variants in SLC5A2 (AAF<0.1%) had a similar effect on increased eGFR after adjustment for rare loss-of-function and missense variants in ANGPTL3 (AAF<0.1%) compared to without adjustment, indicating that the two genes act independently of each other to increase eGFR (see, Table 3).

TABLE 3
Associations with increased eGFR levels for the
burden of rare (AAF < 0.1%) pLOF or
missense variants in the SLC5A2 gene (outcome = eGFR)

| | | Effect | | Allele counts | |
|---|---|---|---|---|---|
| Genetic | ANGPTL3 | per-allele | | (Ref\|Het\| | |
| Exposure | adjustment | (95% CI) | P | Hom) | AAF |
| SLC5A2 | Unadjusted | 0.06 (0.03, | 1.8E−5 | 650,540\| | 0.0027 |
| pLOF | | 0.08) SD | | 3,551\|5 | |
| or 5/5 | | 0.95 (0.52, | | | |
| missense | | 1.39) mL/min | | | |
| variants | | | | | |
| SLC5A2 | Adjusted for | 0.06 (0.03, | 1.6E−5 | 650,540\| | 0.0027 |
| pLOF | ANGPTL3 | 0.08) SD | | 3,551\|5 | |
| or 5/5 | pLOF or 5/5 | 0.96 (0.53, | | | |
| missense | missense | 1.40) mL/min | | | |
| variants | variant | | | | |
| | carrier | | | | |
| | status | | | | |

Abbreviations: CI, confidence interval; SD, standard deviation; mL/min, milliliters per minute; AAF, alternative allele frequency; Ref, homozygous reference genotype; Het, heterozygous carrier of rare pLOF or 5/5 missense variant in SLC5A2; Hom, homozygous carrier of rare pLOF or 5/5 missense variant in SLC5A2; pLOF, predicted loss of function; 5/5 missense, missense variant predicted to be deleterious by 5 out of 5 in silico prediction algorithms; eGFR, estimated glomerular filtration rate.

[0181] Similar results with increased were observed comparing the association for rare SLC5A2 pLOF variants alone (AAF<1%, excluding missense variants) with and without adjustment for ANGPTL3 pLOF variants (see, Table 4), indicating that the association for rare pLOF plus missense variants reflects a loss-of-function in SLC5A2 that is independent of the effects of loss-of-function in ANGPTL3.

TABLE 4
Associations with increased eGFR levels for the burden of rare
(AAF < 1%) pLOF variants in the SLC5A2 gene (outcome = eGFR)

| Genetic | | Effect per-allele | | | |
|---|---|---|---|---|---|
| exposure | Analysis | (95% CI) | P | Allele counts | AAF |
| SLC5A2 | Unadjusted | 0.07 (0.02, | 0.012 | 676,295\|753\|0 | 0.00056 |
| pLOF | | 0.12) SD | | | |
| variants | | 1.24 (0.27, 2.20) | | | |
| | | mL/min | | | |
| SLC5A2 | Adjusted for | 0.07 (0.02, | 0.010 | 676,295\|753\|0 | 0.00056 |
| pLOF | ANGPTL3 | 0.13) SD | | | |
| variants | pLOF variant | 1.27 (0.30, 2.23) | | | |
| | carrier status | mL/min | | | |

Abbreviations: CI, confidence interval; SD, standard deviation; mL/min, milliliters per minute; AAF, alternative allele frequency; Ref, homozygous reference genotype; Het, heterozygous carrier of rare pLOF variant in SLC5A2; Hom, homozygous carrier of rare pLOF variant in SLC5A2; pLOF, predicted loss of function; eGFR, estimated glomerular filtration rate.

### Example 3: Rare Coding Variants in ANGPTL3 and SLC5A2 are Associated with Improved Kidney Function Independently of the Other Gene

[0182] To formally test whether the effects of ANGPTL3 and SLC5A2 rare coding variants on eGFR were independent of each other, we performed an interaction analysis. The main effects of ANGPTL3 (that is, the effect of ANGPTL3 variants in individuals with homozygous reference genotype for SLC5A2 variants) and SLC5A2 (that is, the effect of SLC5A2 variants in individuals with homozygous reference genotype for ANGPTL3 variants) on eGFR were similar (see, Table 5) to the overall effects on eGFR of ANGPTL3 rare coding variants (see, Table 1) or SLC5A2 rare coding variants (see, Table 3), respectively. The interaction term, which tests whether the effect of ANGPTL3 variants differs in SLC5A2 homozygous reference vs SLC5A2 heterozygous variants carriers, and whether the effect of SLC5A2 variants differs in ANGPTL3 homozygous reference vs ANGPTL3 heterozygous variants carriers, was not significant (see, Table 5). This indicates that the effects of ANGPTL3 do not depend on SLC5A2 genotype status and that the effects of SLC5A2 do not depend on ANGPTL3 genotype status, and thus that there is no evidence of deviation from additivity for the associations of these two genotypes.

TABLE 5
Interaction between the burdens of rare (AAF < 0.1%)
pLOF or missense variants in the ANGPTL3 and SLC5A2
genes in effects on eGFR (outcome = eGFR)

| | | Effect per-allele | | Allele counts |
|---|---|---|---|---|
| Row | Genetic exposure | (95% CI) | P | (Ref\|Het\|Hom) |
| 1 | ANGPTL3 pLOF or | 0.04 (0.01, | 0.0044 | 629,281\| |
| | 5/5 missense variants | 0.07) SD | | 2,759\|2 |
| | (main effect) | 0.72 (0.23, 1.22) | | |
| | | mL/min | | |
| 2 | SLC5A2 pLOF or 5/5 | 0.06 (0.03, | 1.7E−05 | 629,281\| |
| | missense variants | 0.08) SD | | 3,448\|4 |
| | (main effect) | 0.98 (0.53, 1.42) | | |
| | | mL/min | | |
| 3 | ANGPTL3 pLOF or | −0.18 (−0.52, | 0.31 | 6,207\|15\|1 |
| | 5/5 missense variants | 0.16) SD | | |
| | X | −3.10 (−9.02, | | |
| | SLC5A2 pLOF or 5/5 | 2.83) | | |
| | missense | mL/min | | |
| | variants | | | |
| | (interaction effect) | | | |

Abbreviations: CI, confidence interval; SD, standard deviation; mL/min, milliliters per minute; AAF, alternative allele frequency; Ref, homozygous reference genotype; Het, heterozygous carrier of rare pLOF or 5/5 missense variant in ANGPTL3 (Row 1) or SLC5A2 (Row 2); Hom, homozygous carrier of rare pLOF or 5/5 missense variant in ANGPTL3 (Row 1) or SLC5A2 (Row 2); pLOF, predicted loss of function; 5/5 missense, missense variant predicted to be deleterious by 5 out of 5 in silico prediction algorithms; eGFR, estimated glomerular filtration rate.

[0183] The associations between ANGPTL3, SLC5A2, and eGFR were driven by multiple rare pLOF or missense variants in the ANGPTL3 and SLC5A2 genes (see, Table 6).

TABLE 6
Missense or pLOF variants in ANGPTL3 or SLC5A2 that were identified by exome sequencing and included in the gene burden association analyses

| Genomic | | | | | | | |
|---|---|---|---|---|---|---|---|
| coordinate | | | | | | | |
| for the | | | | ANGPTL3 | | SLC5A2 | |
| genetic | Predicted | Coding | Protein | pLOF or | ANGPTL3 | pLOF or | SLC5A2 |
| variant, | consequence | DNA | amino acid | 5/5 ms | pLOF | 5/5 ms | pLOF |
| C:P:R:A | of variant | change | change | variant | variant | variant | variant |
| 1:62597562:T:TA | frameshift | c.1dupA | p.Met1fs | Yes | Yes | No | No |
| 1:62597568:T:G | start lost | c.2T > G | p.Met1? | Yes | Yes | No | No |
| 1:62597608:T:TA | frameshift | c.43dupA | p.Ile15fs | Yes | Yes | No | No |
| 1:62597633:A:AG | frameshift | c.67_68insG | p.Asn23fs | Yes | Yes | No | No |
| 1:62597634:A:AT | frameshift | c.70dupT | p.Ser24fs | Yes | Yes | No | No |
| 1:62597670:C:G | stop gained | c.104C > G | p.Ser35* | Yes | Yes | No | No |
| 1:62597673:G:C | missense (5/5) | c.107G > C | p.Arg36Thr | Yes | No | No | No |
| 1:62597676:T:C | missense (5/5) | c.110T > C | p.Phe37Ser | Yes | No | No | No |
| 1:62597676:T:G | missense (5/5) | c.110T > G | p.Phe37Cys | Yes | No | No | No |
| 1:62597679:C:A | missense (5/5) | c.113C > A | p.Ala38Asp | Yes | No | No | No |
| 1:62597690:G:A | missense (5/5) | c.124G > A | p.Asp42Asn | Yes | No | No | No |
| 1:62597693:G:A | missense (5/5) | c.127G > A | p.Val43Ile | Yes | No | No | No |
| 1:62597694:T:C | missense (5/5) | c.128T > C | p.Val43Ala | Yes | No | No | No |
| 1:62597723:T:G | missense (5/5) | c.157T > G | p.Leu53Val | Yes | No | No | No |
| 1:62597727:G:A | missense (5/5) | c.161G > A | p.Gly54Glu | Yes | No | No | No |
| 1:62597731:TG:T | frameshift | c.167delG | p.Gly56fs | Yes | Yes | No | No |
| 1:62597742:AC:A | frameshift | c.177delC | p.Phe60fs | Yes | Yes | No | No |
| 1:62597743:CTT:C | frameshift | c.179_180delTT | p.Phe60fs | Yes | Yes | No | No |
| 1:62597751:A:G | missense (5/5) | c.185A > G | p.His62Arg | Yes | No | No | No |
| 1:62597754:A:C | missense (5/5) | c.188A > C | p.Lys63Thr | Yes | No | No | No |
| 1:62597757:C:T | missense (5/5) | c.191C > T | p.Thr64Met | Yes | No | No | No |
| 1:62597759:A:T | stop gained | c.193A > T | p.Lys65* | Yes | Yes | No | No |
| 1:62597774:G:A | missense (5/5) | c.208G > A | p.Asp70Asn | Yes | No | No | No |
| 1:62597787:A:C | missense (5/5) | c.221A > C | p.Lys74Thr | Yes | No | No | No |
| 1:62597789:C:T | missense (5/5) | c.223C > T | p.Leu75Phe | Yes | No | No | No |
| 1:62597815:T:G | stop gained | c.249T > G | p.Tyr83* | Yes | Yes | No | No |
| 1:62597823:C:G | missense (5/5) | c.257C > G | p.Ser86Trp | Yes | No | No | No |
| 1:62597846:G:T | stop gained | c.280G > T | p.Glu94* | Yes | Yes | No | No |
| 1:62597855:A:T | stop gained | c.289A > T | p.Lys97* | Yes | Yes | No | No |
| 1:62597896:T:G | missense (5/5) | c.330T > G | p.Asn110Lys | Yes | No | No | No |
| 1:62597901:A:C | missense (5/5) | c.335A > C | p.Glu112Ala | Yes | No | No | No |
| 1:62597909:AAT:A | frameshift | c.346_347delAT | p.Met116fS | Yes | Yes | No | No |
| 1:62597921:GAACTC:G | frameshift | c.363_367delCTCAA | p.Asn121fs | Yes | Yes | No | No |
| 1:62597946:T:C | missense (5/5) | c.380T > C | p.Leu127Pro | Yes | No | No | No |
| 1:62597951:G:T | stop gained | c.385G > T | p.Glu129* | Yes | Yes | No | No |
| 1:62597954:G:GA | frameshift | c.394dupA | p.Ile132fs | Yes | Yes | No | No |
| 1:62597967:T:A | missense (5/5) | c.401T > A | p.Leu134His | Yes | No | No | No |
| 1:62597972:CAA:C | frameshift | c.410_411delAA | p.Lys137fs | Yes | Yes | No | No |
| 1:62597996:CAACT:C | frameshift | c.439_442delAACT | p.Asn147fs | Yes | Yes | No | No |
| 1:62598020:C:T | stop gained | c.454C > T | p.Gln152* | Yes | Yes | No | No |
| 1:62598048:TA:T | frameshift | c.484delA | p.Thr162fs | Yes | Yes | No | No |
| 1:62598059:A:G | missense (5/5) | c.493A > G | p.Lys165Glu | Yes | No | No | No |
| 1:62598059:AAAGT:A | frameshift | c.494_495 + 2delAAGT | p.Lys165fs | Yes | Yes | No | No |
| 1:62598711:C:T | stop gained | c.511C > T | p.Gln171* | Yes | Yes | No | No |
| 1:62598714:G:T | missense (5/5) | c.514G > T | p.Asp172Tyr | Yes | No | No | No |
| 1:62598714:G:C | missense (5/5) | c.514G > C | p.Asp172His | Yes | No | No | No |
| 1:62598715:A:G | missense (5/5) | c.515A > G | p.Asp172Gly | Yes | No | No | No |
| 1:62598724:T:C | missense (5/5) | c.524T > C | p.Ile175Thr | Yes | No | No | No |
| 1:62598753:CA:C | frameshift | c.555delA | p.Gln185fs | Yes | Yes | No | No |
| 1:62598758:T:A | stop gained | c.558T > A | p.Tyr186* | Yes | Yes | No | No |
| 1:62598762:CAATT:C | frameshift | c.565_568delTTAA | p.Leu189fs | Yes | Yes | No | No |
| 1:62598771:CA:C | frameshift | c.573delA | p.Gln191fs | Yes | Yes | No | No |
| 1:62598774:C:T | stop gained | c.574C > T | p.Gln192* | Yes | Yes | No | No |
| 1:62598774:CA:C | frameshift | c.575delA | p.Gln192fs | Yes | Yes | No | No |
| 1:62598787:T:C | missense (5/5) | c.587T > C | p.Ile196Thr | Yes | No | No | No |
| 1:62598798:GA:G | frameshift | c.602delA | p.Asn201fs | Yes | Yes | No | No |
| 1:62598799:A:G | missense (5/5) | c.599A > G | p.Glu200Gly | Yes | No | No | No |
| 1:62598807:G:A | splice donor | c.606 + 1G > A | | Yes | Yes | No | No |
| 1:62598807:G:C | splice donor | c.606 + 1G > C | | Yes | Yes | No | No |
| 1:62601080:A:G | spliceacceptor | c.607 − 2A > G | | Yes | Yes | No | No |
| 1:62601115:AT:A | frameshift | c.643delT | p.Ser215fs | Yes | Yes | No | No |
| 1:62601197:G:A | splice donor | c.721 + 1G > A | | Yes | Yes | No | No |
| 1:62601783:T:G | missense (5/5) | c.736T > G | p.Cys246Gly | Yes | No | No | No |
| 1:62601796:A:G | missense (5/5) | c.749A > G | p.Tyr250Cys | Yes | No | No | No |
| 1:62601804:G:T | missense (5/5) | c.757G > T | p.Gly253Cys | Yes | No | No | No |
| 1:62601855:T:C | missense (5/5) | c.808T > C | p.Phe270Leu | Yes | No | No | No |
| 1:62601861:G:T | missense (5/5) | c.814G > T | p.Val272Phe | Yes | No | No | No |
| 1:62601868:G:A | missense (5/5) | c.821G > A | p.Cys274Tyr | Yes | No | No | No |
| 1:62601868:G:T | missense (5/5) | c.821G > T | p.Cys274Phe | Yes | No | No | No |
| 1:62601870:GATGTT:G | frameshift | c.826_830delGTTAT | p.Val276fs | Yes | Yes | No | No |
| 1:62601880:C:G | stop gained | c.833C > G | p.Ser278* | Yes | Yes | No | No |
| 1:62601880:C:A | stop gained | c.833C > A | p.Ser278* | Yes | Yes | No | No |
| 1:62602284:G:C | splice acceptor | c.836 − 1G > C | | Yes | Yes | No | No |
| 1:62602297:C:A | missense (5/5) | c.848C > A | p.Thr283Lys | Yes | No | No | No |
| 1:62602300:T:C | missense (5/5) | c.851T > C | p.Leu284Ser | Yes | No | No | No |
| 1:62602306:A:G | missense (5/5) | c.857A > G | p.Gln286Arg | Yes | No | No | No |
| 1:62602311:C:T | stop gained | c.862C > T | p.Arg288* | Yes | Yes | No | No |
| 1:62602316:AGATG:A | frameshift | c.871_874delGGAT | p.Gly291fs | Yes | Yes | No | No |
| 1:62602317:G:C | missense (5/5) | c.868G > C | p.Asp290His | Yes | No | No | No |
| 1:62602323:T:C | missense (5/5) | c.874T > C | p.Ser292Pro | Yes | No | No | No |
| 1:62602331:C:A | missense (5/5) | c.882C > A | p.Asn294Lys | Yes | No | No | No |
| 1:62602332:T:G | missense (5/5) | c.883T > G | p.Phe295Val | Yes | No | No | No |
| 1:62602337:T:A | missense (5/5) | c.888T > A | p.Asn296Lys | Yes | No | No | No |
| 1:62602338:GA:G | frameshift | c.892delA | p.Thr298fs | Yes | Yes | No | No |
| 1:62602342:C:T | missense (5/5) | c.893C > T | p.Thr298Met | Yes | No | No | No |
| 1:62602345:G:A | stop gained | c.896G > A | p.Trp299* | Yes | Yes | No | No |
| 1:62602346:G:A | stop gained | c.897G > A | p.Trp299* | Yes | Yes | No | No |
| 1:62602355:C:A | stop gained | c.906C > A | p.Tyr302* | Yes | Yes | No | No |
| 1:62602373:GC:G | frameshift | c.925delC | p.Asp310fs | Yes | Yes | No | No |
| 1:62602381:G:GT | splice donor | c.931 + 1_931 + 2insT | | Yes | Yes | No | No |
| 1:62602381:G:A | splice donor | c.931 + 1G > A | | Yes | Yes | No | No |
| 1:62603986:C:CT | frameshift | c.950dupT | p.Glu318fs | Yes | Yes | No | No |
| 1:62603993:A:G | missense (5/5) | c.956A > G | p.Lys319Arg | Yes | No | No | No |
| 1:62603996:T:C | missense (5/5) | c.959T > C | p.Ile320Thr | Yes | No | No | No |
| 1:62604005:T:C | missense (5/5) | c.968T > C | p.Ile323Thr | Yes | No | No | No |
| 1:62604017:CTAAT:C | frameshift | c.983_986delATTA | p.Asn328fs | Yes | Yes | No | No |
| 1:62604024:T:A | stop gained | c.987T > A | p.Tyr329* | Yes | Yes | No | No |
| 1:62604031:C:T | stop gained | c.994C > T | p.Arg332* | Yes | Yes | No | No |
| 1:62604035:T:G | missense (5/5) | c.998T > G | p.Ile333Ser | Yes | No | No | No |
| 1:62604035:T:A | missense (5/5) | c.998T > A | p.Ile333Asn | Yes | No | No | No |
| 1:62604037:G:T | stop gained | c.1000G > T | p.Glu334* | Yes | Yes | No | No |
| 1:62604044:A:G | missense (5/5) | c.1007A > G | p.Glu336Gly | Yes | No | No | No |
| 1:62604049:T:C | missense (5/5) | c.1012T > C | p.Trp338Arg | Yes | No | No | No |
| 1:62604051:G:C | missense (5/5) | c.1014G > C | p.Trp338Cys | Yes | No | No | No |
| 1:62604083:T:G | missense (5/5) | c.1046T > G | p.Phe349Cys | Yes | No | No | No |
| 1:62604109:T:C | missense (5/5) | c.1072T > C | p.Tyr358His | Yes | No | No | No |
| 1:62604160:GA:G | frameshift | c.1127delA | p.Asn376fs | Yes | Yes | No | No |
| 1:62604170:AT:A | frameshift | c.1136delT | p.Leu379fs | Yes | Yes | No | No |
| 1:62604184:A:T | missense (5/5) | c.1147A > T | p.Thr383Ser | Yes | No | No | No |
| 1:62604185:C:T | missense (5/5) | c.1148C > T | p.Thr383Ile | Yes | No | No | No |
| 1:62604187:TG:T | frameshift | c.1153delG | p.Asp385fs | Yes | Yes | No | No |
| 1:62604190:G:C | missense (5/5) | c.1153G > C | p.Asp385His | Yes | No | No | No |
| 1:62604190:G:T | missense (5/5) | c.1153G > T | p.Asp385Tyr | Yes | No | No | No |
| 1:62604218:G:C | missense (5/5) | c.1181G > C | p.Cys394Ser | Yes | No | No | No |
| 1:62604224:A:AGG | frameshift | c.1189_1190dupGG | p.Tyr398fs | Yes | Yes | No | No |
| 1:62604233:C:A | stop gained | c.1196C > A | p.Ser399* | Yes | Yes | No | No |
| 1:62604235:G:A | missense (5/5) | c.1198G > A | p.Gly400Arg | Yes | No | No | No |
| 1:62604236:G:T | splice donor | c.1198 + 1G > T | | Yes | Yes | No | No |
| 1:62604639:G:A | stop gained | c.1205G > A | p.Trp402* | Yes | Yes | No | No |
| 1:62604640:G:GT | frameshift | c.1207dupT | p.Trp403fs | Yes | Yes | No | No |
| 1:62604645:G:A | stop gained | c.1211G > A | p.Trp404* | Yes | Yes | No | No |
| 1:62604656:T:C | missense (5/5) | c.1222T > C | p.Cys408Arg | Yes | No | No | No |
| 1:62604669:AC:A | frameshift | c.1237delC | p.Leu413fs | Yes | Yes | No | No |
| 1:62604684:A:G | missense (5/5) | c.1250A > G | p.Tyr417Cys | Yes | No | No | No |
| 1:62604701:A:C | missense (5/5) | c.1267A > C | p.Lys423Gln | Yes | No | No | No |
| 1:62604762:C:CT | frameshift | c.1329dupT | p.Ile444fs | Yes | Yes | No | No |
| 1:62604780:T:G | missense (5/5) | c.1346T > G | p.Met449Arg | Yes | No | No | No |
| 1:62604803:G:T | stop gained | c.1369G > T | p.Glu457* | Yes | Yes | No | No |
| 1:62604806:AG:A | frameshift | c.1373delG | p.Ser458fs | Yes | Yes | No | No |
| 1:62604809:T:TGAATCTG | frameshift | c.1375_1376insGAATCTG | p.Phe459fs | Yes | Yes | No | No |
| 16:31483138:T:C | start lost | c.2T > C | p.Met1? | No | No | Yes | Yes |
| 16:31483139:G:C | start lost | c.3G > C | p.Met1? | No | No | Yes | Yes |
| 16:31483166:A:AC | frameshift | c.32dupC | p.Glu12fs | No | No | Yes | Yes |
| 16:31483174:TG:T | frameshift | c.43delG | p.Ala15fs | No | No | Yes | Yes |
| 16:31483195:T:C | missense (5/5) | c.59T > C | p.Ile20Thr | No | No | Yes | No |
| 16:31483235:C:A | missense (5/5) | c.99C > A | p.Phe33Leu | No | No | Yes | No |
| 16:31483252:T:C | missense (5/5) | c.116T > C | p.Val39Ala | No | No | Yes | No |
| 16:31483260:T:G | missense (5/5) | c.124T > G | p.Trp42Gly | No | No | Yes | No |
| 16:31483262:G:A | stop gained | c.126G > A | p.Trp42* | No | No | Yes | Yes |
| 16:31483263:G:A | splice donor | c.126 + 1G > A | | No | No | Yes | Yes |
| 16:31484674:C:T | missense (5/5) | c.128C > T | p.Ser43Phe | No | No | Yes | No |
| 16:31484682:A:G | missense (5/5) | c.136A > G | p.Arg46Gly | No | No | Yes | No |
| 16:31484697:A:C | missense (5/5) | c.151A > C | p.Thr51Pro | No | No | Yes | No |
| 16:31484706:G:C | missense (5/5) | c.160G > C | p.Gly54Arg | No | No | Yes | No |
| 16:31484706:G:A | missense (5/5) | c.160G > A | p.Gly54Ser | No | No | Yes | No |
| 16:31484707:G:A | missense (5/5) | c.161G > A | p.Gly54Asp | No | No | Yes | No |
| 16:31484710:A:C | missense (5/5) | c.164A > C | p.Tyr55Ser | No | No | Yes | No |
| 16:31484714:C:G | missense (5/5) | c.168C > G | p.Phe56Leu | No | No | Yes | No |
| 16:31484716:T:C | missense (5/5) | c.170T > C | p.Leu57Pro | No | No | Yes | No |
| 16:31484719:C:A | missense (5/5) | c.173C > A | p.Ala58Glu | No | No | Yes | No |
| 16:31484724:C:T | missense (5/5) | c.178C > T | p.Arg60Cys | No | No | Yes | No |
| 16:31484725:G:C | missense (5/5) | c.179G > C | p.Arg60Pro | No | No | Yes | No |
| 16:31484725:G:A | missense (5/5) | c.179G > A | p.Arg60His | No | No | Yes | No |
| 16:31484731:TG:T | frameshift | c.187delG | p.Val63fs | No | No | Yes | Yes |
| 16:31484732:G:T | missense (5/5) | c.186G > T | p.Met62Ile | No | No | Yes | No |
| 16:31484738:G:T | missense (5/5) | c.192G > T | p.Trp64Cys | No | No | Yes | No |
| 16:31484740:G:A | stop gained | c.194G > A | p.Trp65* | No | No | Yes | Yes |
| 16:31484743:C:A | missense (5/5) | c.197C > A | p.Pro66Gln | No | No | Yes | No |
| 16:31484817:A:G | spliceacceptor | c.199 − 2A > G | | No | No | Yes | Yes |
| 16:31484817:AG:A | frameshift | c.199delG | p.Val67fs | No | No | Yes | Yes |
| 16:31484826:CCT:C | frameshift | c.213_214delCT | p.Phe72fs | No | No | Yes | Yes |
| 16:31484828:T:A | missense (5/5) | c.208T > A | p.Ser70Thr | No | No | Yes | No |
| 16:31484831:C:G | missense (5/5) | c.211C > G | p.Leu71Val | No | No | Yes | No |
| 16:31484836:C:CAG | frameshift | c.216_217insAG | p.Ala73fs | No | No | Yes | Yes |
| 16:31484837:G:A | missense (5/5) | c.217G > A | p.Ala73Thr | No | No | Yes | No |
| 16:31484849:G:A | missense (5/5) | c.229G > A | p.Gly77Ser | No | No | Yes | No |
| 16:31484849:G:T | missense (5/5) | c.229G > T | p.Gly77Cys | No | No | Yes | No |
| 16:31484849:G:C | missense (5/5) | c.229G > C | p.Gly77Arg | No | No | Yes | No |
| 16:31484864:G:T | missense (5/5) | c.244G > T | p.Val82Leu | No | No | Yes | No |
| 16:31484864:G:A | missense (5/5) | c.244G > A | p.Val82Met | No | No | Yes | No |
| 16:31484865:T:G | missense (5/5) | c.245T > G | p.Val82Gly | No | No | Yes | No |
| 16:31484868:G:A | missense (5/5) | c.248G > A | p.Gly83Asp | No | No | Yes | No |
| 16:31484870:C:G | missense (5/5) | c.250C > G | p.Leu84Val | No | No | Yes | No |
| 16:31484877:G:A | missense (5/5) | c.257G > A | p.Gly86Glu | No | No | Yes | No |
| 16:31484885:G:A | missense (5/5) | c.265G > A | p.Ala89Thr | No | No | Yes | No |
| 16:31484888:G:A | missense (5/5) | c.268G > A | p.Ala90Thr | No | No | Yes | No |
| 16:31484914:C:CTT | frameshift | c.294_295insTT | p.Glu99fs | No | No | Yes | Yes |
| 16:31484915:G:A | missense (5/5) | c.295G > A | p.Glu99Lys | No | No | Yes | No |
| 16:31484919:G:A | stop gained | c.299G > A | p.Trp100* | No | No | Yes | Yes |
| 16:31485730:C:T | missense (5/5) | c.305C > T | p.Ala102Val | No | No | Yes | No |
| 16:31485745:T:G | missense (5/5) | c.320T > G | p.Leu107Arg | No | No | Yes | No |
| 16:31485745:T:C | missense (5/5) | c.320T > C | p.Leu107Pro | No | No | Yes | No |
| 16:31485748:T:C | missense (5/5) | c.323T > C | p.Leu108Pro | No | No | Yes | No |
| 16:31485751:T:G | missense (5/5) | c.326T > G | p.Leu109Arg | No | No | Yes | No |
| 16:31485753:G:A | missense (5/5) | c.328G > A | p.Gly110Ser | No | No | Yes | No |
| 16:31485768:C:T | missense (5/5) | c.343C > T | p.Pro115Ser | No | No | Yes | No |
| 16:31485771:G:A | missense (5/5) | c.346G > A | p.Val116Met | No | No | Yes | No |
| 16:31485771:G:T | missense (5/5) | c.346G > T | p.Val116Leu | No | No | Yes | No |
| 16:31485774:T:C | missense (5/5) | c.349T > C | p.Tyr117His | No | No | Yes | No |
| 16:31485775:A:G | missense (5/5) | c.350A > G | p.Tyr117Cys | No | No | Yes | No |
| 16:31485784:C:T | missense (5/5) | c.359C > T | p.Ala120Val | No | No | Yes | No |
| 16:31485786:G:T | missense (5/5) | c.361G > T | p.Gly121Trp | No | No | Yes | No |
| 16:31485793:T:A | missense (5/5) | c.368T > A | p.Ile123Asn | No | No | Yes | No |
| 16:31485796:C:T | missense (5/5) | c.371C > T | p.Thr124Met | No | No | Yes | No |
| 16:31485799:T:C | missense (5/5) | c.374T > C | p.Met125Thr | No | No | Yes | No |
| 16:31485806:G:T | missense (5/5) | c.381G > T | p.Gln127His | No | No | Yes | No |
| 16:31485809:C:G | stop gained | c.384C > G | p.Tyr128* | No | No | Yes | Yes |
| 16:31485811:T:C | missense (5/5) | c.386T > C | p.Leu129Pro | No | No | Yes | No |
| 16:31485813:C:T | missense (5/5) | c.388C > T | p.Arg130Cys | No | No | Yes | No |
| 16:31485819:C:T | missense (5/5) | c.394C > T | p.Arg132Cys | No | No | Yes | No |
| 16:31485819:C:A | missense (5/5) | c.394C > A | p.Arg132Ser | No | No | Yes | No |
| 16:31485820:G:A | missense (5/5) | c.395G > A | p.Arg132His | No | No | Yes | No |
| 16:31485824:C:A | missense (5/5) | c.399C > A | p.Phe133Leu | No | No | Yes | No |
| 16:31485825:G:C | missense (5/5) | c.400G > C | p.Gly134Arg | No | No | Yes | No |
| 16:31485825:G:A | missense (5/5) | c.400G > A | p.Gly134Ser | No | No | Yes | No |
| 16:31485828:G:A | missense (5/5) | c.403G > A | p.Gly135Ser | No | No | Yes | No |
| 16:31485834:C:G | missense (5/5) | c.409C > G | p.Arg137Gly | No | No | Yes | No |
| 16:31485834:C:T | missense (5/5) | c.409C > T | p.Arg137Cys | No | No | Yes | No |
| 16:31485835:G:A | missense (5/5) | c.410G > A | p.Arg137His | No | No | Yes | No |
| 16:31485837:A:T | missense (5/5) | c.412A > T | p.Ile138Phe | No | No | Yes | No |
| 16:31485840:C:T | missense (5/5) | c.415C > T | p.Arg139Cys | No | No | Yes | No |
| 16:31485841:G:T | missense (5/5) | c.416G > T | p.Arg139Leu | No | No | Yes | No |
| 16:31485841:G:A | missense (5/5) | c.416G > A | p.Arg139His | No | No | Yes | No |
| 16:31485848:C:A | stop gained | c.423C > A | p.Tyr141* | No | No | Yes | Yes |
| 16:31485850:T:G | missense (5/5) | c.425T > G | p.Leu142Arg | No | No | Yes | No |
| 16:31485852:T:C | missense (5/5) | c.427T > C | p.Ser143Pro | No | No | Yes | No |
| 16:31485865:T:A | missense (5/5) | c.440T > A | p.Leu147His | No | No | Yes | No |
| 16:31485873:T:A | missense (5/5) | c.448T > A | p.Tyr150Asn | No | No | Yes | No |
| 16:31485873:T:C | missense (5/5) | c.448T > C | p.Tyr150His | No | No | Yes | No |
| 16:31485876:A:C | missense (5/5) | c.451A > C | p.Ile151LeU | No | No | Yes | No |
| 16:31485885:A:G | missense (5/5) | c.460A > G | p.Lys154Glu | No | No | Yes | No |
| 16:31485894:G:C | splice donor | c.468 + 1G > C | | No | No | Yes | Yes |
| 16:31486168:A:T | splice acceptor | c.469 − 2A > T | | No | No | Yes | Yes |
| 16:31486177:T:G | missense (5/5) | c.476T > G | p.Met159Arg | No | No | Yes | No |
| 16:31486182:T:C | missense (5/5) | c.481T > C | p.Ser161Pro | No | No | Yes | No |
| 16:31486183:C:T | missense (5/5) | c.482C > T | p.Ser161Phe | No | No | Yes | No |
| 16:31486185:G:A | missense (5/5) | c.484G > A | p.Gly162Arg | No | No | Yes | No |
| 16:31486200:CA:C | frameshift | c.500delA | p.Gln167fs | No | No | Yes | Yes |
| 16:31486204:A:G | missense (5/5) | c.503A > G | p.Gln168Arg | No | No | Yes | No |
| 16:31486205:G:T | missense (5/5) | c.504G > T | p.Gln168His | No | No | Yes | No |
| 16:31486206:GC:G | frameshift | c.506delC | p.Ala169fs | No | No | Yes | Yes |
| 16:31486207:C:A | missense (5/5) | c.506C > A | p.Ala169Asp | No | No | Yes | No |
| 16:31486210:T:C | missense (5/5) | c.509T > C | p.Leu170Pro | No | No | Yes | No |
| 16:31486212:G:A | missense (5/5) | c.511G > A | p.Gly171Ser | No | No | Yes | No |
| 16:31486218:A:C | missense (5/5) | c.517A > C | p.Asn173His | No | No | Yes | No |
| 16:31486222:T:C | missense (5/5) | c.521T > C | p.Ile174Thr | No | No | Yes | No |
| 16:31486223:C:G | missense (5/5) | c.522C > G | p.Ile174Met | No | No | Yes | No |
| 16:31486225:A:C | missense (5/5) | c.524A > C | p.Tyr175Ser | No | No | Yes | No |
| 16:31486231:C:T | missense (5/5) | c.530C > T | p.Ser177Phe | No | No | Yes | No |
| 16:31486240:C:A | missense (5/5) | c.539C > A | p.Ala180Glu | No | No | Yes | No |
| 16:31486242:C:T | missense (5/5) | c.541C > T | p.Leu181Phe | No | No | Yes | No |
| 16:31486252:T:A | missense (5/5) | c.551T > A | p.Ile184Asn | No | No | Yes | No |
| 16:31486267:C:T | missense (5/5) | c.566C > T | p.Thr189Met | No | No | Yes | No |
| 16:31486269:G:A | missense (5/5) | c.568G > A | p.Val190Met | No | No | Yes | No |
| 16:31486272:A:C | missense (5/5) | c.571A > C | p.Thr191Pro | No | No | Yes | No |
| 16:31487318:A:G | splice acceptor | c.575 − 2A > G | | No | No | Yes | Yes |
| 16:31487322:G:A | missense (5/5) | c.577G > A | p.Gly193Arg | No | No | Yes | No |
| 16:31487323:G:A | missense (5/5) | c.578G > A | p.Gly193GlU | No | No | Yes | No |
| 16:31487328:G:C | missense (5/5) | c.583G > C | p.Ala195Pro | No | No | Yes | No |
| 16:31487341:A:G | missense (5/5) | c.596A > G | p.Tyr199Cys | No | No | Yes | No |
| 16:31487343:A:G | missense (5/5) | c.598A > G | p.Thr200Ala | No | No | Yes | No |
| 16:31487355:C:T | stop gained | c.610C > T | p.Gln204* | No | No | Yes | Yes |
| 16:31487532:T:G | missense (5/5) | c.658T > G | p.Phe220Val | No | No | Yes | No |
| 16:31487544:G:A | missense (5/5) | c.670G > A | p.Gly224Ser | No | No | Yes | No |
| 16:31487547:G:C | missense (5/5) | c.673G > C | p.Gly225Arg | No | No | Yes | No |
| 16:31487547:G:A | missense (5/5) | c.673G > A | p.Gly225Arg | No | No | Yes | No |
| 16:31487557:G:T | missense (5/5) | c.683G > T | p.Gly228Val | No | No | Yes | No |
| 16:31487571:T:C | missense (5/5) | c.697T > C | p.Tyr233His | No | No | Yes | No |
| 16:31487571:T:TA | frameshift | c.698dupA | p.Tyr233fs | No | No | Yes | Yes |
| 16:31487596:C:CG | frameshift | c.724dupG | p.Val242fs | No | No | Yes | Yes |
| 16:31487607:G:C | missense (5/5) | c.733G > C | p.Asp245His | No | No | Yes | No |
| 16:31487635:TC:T | frameshift | c.762delC | p.Cys255fs | No | No | Yes | Yes |
| 16:31487642:T:A | stop gained | c.768T > A | p.Tyr256* | No | No | Yes | Yes |
| 16:31487642:T:G | stop gained | c.768T > G | p.Tyr256* | No | No | Yes | Yes |
| 16:31487655:G:T | missense (5/5) | c.781G > T | p.Asp261Tyr | No | No | Yes | No |
| 16:31487659:C:G | missense (5/5) | c.785C > G | p.Ser262Cys | No | No | Yes | No |
| 16:31487673:C:T | missense (5/5) | c.799C > T | p.Arg267Trp | No | No | Yes | No |
| 16:31487674:G:A | missense (5/5) | c.800G > A | p.Arg267Gln | No | No | Yes | No |
| 16:31487688:G:A | missense (5/5) | c.814G > A | p.Gly272Arg | No | No | Yes | No |
| 16:31487698:C:T | missense (5/5) | c.824C > T | p.Pro275Leu | No | No | Yes | No |
| 16:31487698:C:G | missense (5/5) | c.824C > G | p.Pro275Arg | No | No | Yes | No |
| 16:31487718:G:A | missense (5/5) | c.844G > A | p.Gly282Arg | No | No | Yes | No |
| 16:31487718:G:C | missense (5/5) | c.844G > C | p.Gly282Arg | No | No | Yes | No |
| 16:31487722:TCA:T | frameshift | c.851_852delCA | p.Thr284fs | No | No | Yes | Yes |
| 16:31487723:C:CA | frameshift | c.850dupA | p.Thr284fs | No | No | Yes | Yes |
| 16:31487725:C:T | missense (5/5) | c.851C > T | p.Thr284Ile | No | No | Yes | No |
| 16:31487754:G:T | missense (5/5) | c.880G > T | p.Asp294Tyr | No | No | Yes | No |
| 16:31488032:C:CCGTA | splice acceptor | c.886 − 5_886 − 2dupCGTA | | No | No | Yes | Yes |
| 16:31488038:G:C | missense (5/5) | c.886G > C | p.Val296Leu | No | No | Yes | No |
| 16:31488041:A:G | missense (5/5) | c.889A > G | p.Ile297Val | No | No | Yes | No |
| 16:31488042:T:C | missense (5/5) | c.890T > C | p.Ile297Thr | No | No | Yes | No |
| 16:31488044:G:A | missense (5/5) | c.892G > A | p.Val298Met | No | No | Yes | No |
| 16:31488045:T:C | missense (5/5) | c.893T > C | p.Val298Ala | No | No | Yes | No |
| 16:31488050:C:G | missense (5/5) | c.898C > G | p.Arg300Gly | No | No | Yes | No |
| 16:31488050:C:T | missense (5/5) | c.898C > T | p.Arg300Cys | No | No | Yes | No |
| 16:31488051:G:C | missense (5/5) | c.899G > C | p.Arg300Pro | No | No | Yes | No |
| 16:31488053:T:C | missense (5/5) | c.901T > C | p.Cys301Arg | No | No | Yes | No |
| 16:31488057:T:C | missense (5/5) | c.905T > C | p.Leu302Pro | No | No | Yes | No |
| 16:31488062:G:A | missense (5/5) | c.910G > A | p.Gly304Arg | No | No | Yes | No |
| 16:31488062:G:C | missense (5/5) | c.910G > C | p.Gly304Arg | No | No | Yes | No |
| 16:31488077:C:A | missense (5/5) | c.925C > A | p.His309Asn | No | No | Yes | No |
| 16:31488083:A:G | missense (5/5) | c.931A > G | p.Lys311Glu | No | No | Yes | No |
| 16:31488086:G:A | missense (5/5) | c.934G > A | p.Ala312Thr | No | No | Yes | No |
| 16:31488087:C:A | missense (5/5) | c.935C > A | p.Ala312Glu | No | No | Yes | No |
| 16:31488087:C:T | missense (5/5) | c.935C > T | p.Ala312Val | No | No | Yes | No |
| 16:31488092:T:C | missense (5/5) | c.940T > C | p.Cys314Arg | No | No | Yes | No |
| 16:31488102:G:A | missense (5/5) | c.950G > A | p.Cys317Tyr | No | No | Yes | No |
| 16:31488107:T:TA | frameshift | c.956dupA | p.Tyr319fs | No | No | Yes | Yes |
| 16:31488109:C:A | stop gained | c.957C > A | p.Tyr319* | No | No | Yes | Yes |
| 16:31488109:C:G | stop gained | c.957C > G | p.Tyr319* | No | No | Yes | Yes |
| 16:31488114:A:G | missense (5/5) | c.962A > G | p.Lys321Arg | No | No | Yes | No |
| 16:31488122:C:A | missense (5/5) | c.970C > A | p.Pro324Thr | No | No | Yes | No |
| 16:31488126:T:C | missense (5/5) | c.974T > C | p.Met325Thr | No | No | Yes | No |
| 16:31488134:A:G | missense (5/5) | c.982A > G | p.Met328Val | No | No | Yes | No |
| 16:31488135:T:G | missense (5/5) | c.983T > G | p.Met328Arg | No | No | Yes | No |
| 16:31488135:T:C | missense (5/5) | c.983T > C | p.Met328Thr | No | No | Yes | No |
| 16:31488138:T:C | missense (5/5) | c.986T > C | p.Val329Ala | No | No | Yes | No |
| 16:31488146:G:C | missense (5/5) | c.994G > C | p.Gly332Arg | No | No | Yes | No |
| 16:31488146:G:A | missense (5/5) | c.994G > A | p.Gly332Ser | No | No | Yes | No |
| 16:31488147:G:C | missense (5/5) | c.995G > C | p.Gly332Ala | No | No | Yes | No |
| 16:31488151:G:T | missense (5/5) | c.999G > T | p.Met333Ile | No | No | Yes | No |
| 16:31488151:G:A | missense (5/5) | c.999G > A | p.Met333Ile | No | No | Yes | No |
| 16:31488157:C:A | missense (5/5) | c.1005C > A | p.Ser335Arg | No | No | Yes | No |
| 16:31488158:C:T | missense (5/5) | c.1006C > T | p.Arg336Cys | No | No | Yes | No |
| 16:31488159:G:T | missense (5/5) | c.1007G > T | p.Arg336Leu | No | No | Yes | No |
| 16:31488159:G:A | missense (5/5) | c.1007G > A | p.Arg336His | No | No | Yes | No |
| 16:31488169:C:G | stop gained | c.1017C > G | p.Tyr339* | No | No | Yes | Yes |
| 16:31488170:C:T | missense (5/5) | c.1018C > T | p.Pro340Ser | No | No | Yes | No |
| 16:31488388:G:GTGGC | frameshift | c.1028_1031dupTGGC | p.Cys345fs | No | No | Yes | Yes |
| 16:31488392:C:T | missense (5/5) | c.1031C > T | p.Ala344Val | No | No | Yes | No |
| 16:31488397:G:A | missense (5/5) | c.1036G > A | p.Val346Met | No | No | Yes | No |
| 16:31488403:C:A | missense (5/5) | c.1042C > A | p.Pro348Thr | No | No | Yes | No |
| 16:31488412:T:C | missense (5/5) | c.1051T > C | p.Cys351Arg | No | No | Yes | No |
| 16:31488419:GC:G | frameshift | c.1059delC | p.Val354fs | No | No | Yes | Yes |
| 16:31488424:T:C | missense (5/5) | c.1063T > C | p.Cys355Arg | No | No | Yes | No |
| 16:31488426:C:A | stop gained | c.1065C > A | p.Cys355* | No | No | Yes | Yes |
| 16:31488446:C:T | missense (5/5) | c.1085C > T | p.Ser362Phe | No | No | Yes | No |
| 16:31488449:A:T | missense (5/5) | c.1088A > T | p.Asn363Ile | No | No | Yes | No |
| 16:31488454:G:A | missense (5/5) | c.1093G > A | p.Ala365Thr | No | No | Yes | No |
| 16:31488459:C:G | stop gained | c.1098C > G | p.Tyr366* | No | No | Yes | Yes |
| 16:31488463:C:T | missense (5/5) | c.1102C > T | p.Arg368Trp | No | No | Yes | No |
| 16:31488469:G:A | missense (5/5) | c.1108G > A | p.Val370Ile | No | No | Yes | No |
| 16:31488470:T:C | missense (5/5) | c.1109T > C | p.Val370Ala | No | No | Yes | No |
| 16:31488473:T:A | missense (5/5) | c.1112T > A | p.Val371Glu | No | No | Yes | No |
| 16:31488473:T:G | missense (5/5) | c.1112T > G | p.Val371Gly | No | No | Yes | No |
| 16:31488478:C:T | missense (5/5) | c.1117C > T | p.Leu373Phe | No | No | Yes | No |
| 16:31488483:G:A | missense (5/5) | c.1122G > A | p.Met374Ile | No | No | Yes | No |
| 16:31488484:C:G | missense (5/5) | c.1123C > G | p.Pro375Ala | No | No | Yes | No |
| 16:31488485:C:T | missense (5/5) | c.1124C > T | p.Pro375Leu | No | No | Yes | No |
| 16:31488491:G:T | splice donor | c.1129 + 1G > T | | No | No | Yes | Yes |
| 16:31488620:A:C | splice acceptor | c.1130 − 2A > C | | No | No | Yes | Yes |
| 16:31488621:G:A | splice acceptor | c.1130 − 1G > A | | No | No | Yes | Yes |
| 16:31488622:G:A | missense (5/5) | c.1130G > A | p.Gly377Asp | No | No | Yes | No |
| 16:31488622:G:C | missense (5/5) | c.1130G > C | p.Gly377Ala | No | No | Yes | No |
| 16:31488625:T:C | missense (5/5) | c.1133T > C | p.Leu378Pro | No | No | Yes | No |
| 16:31488629:C:CG | frameshift | c.1139dupG | p.Leu381fs | No | No | Yes | Yes |
| 16:31488631:G:A | missense (5/5) | c.1139G > A | p.Gly380Glu | No | No | Yes | No |
| 16:31488636:A:C | missense (5/5) | c.1144A > C | p.Met382Leu | No | No | Yes | No |
| 16:31488637:T:A | missense (5/5) | c.1145T > A | p.Met382Lys | No | No | Yes | No |
| 16:31488637:T:C | missense (5/5) | c.1145T > C | p.Met382Thr | No | No | Yes | No |
| 16:31488638:G:A | missense (5/5) | c.1146G > A | p.Met382Ile | No | No | Yes | No |
| 16:31488640:T:C | missense (5/5) | c.1148T > C | p.Leu383Pro | No | No | Yes | No |
| 16:31488643:C:T | missense (5/5) | c.1151C > T | p.Ala384Val | No | No | Yes | No |
| 16:31488645:G:A | missense (5/5) | c.1153G > A | p.Val385Ile | No | No | Yes | No |
| 16:31488645:G:T | missense (5/5) | c.1153G > T | p.Val385Phe | No | No | Yes | No |
| 16:31488648:A:C | missense (5/5) | c.1156A > C | p.Met386Leu | No | No | Yes | No |
| 16:31488649:T:C | missense (5/5) | c.1157T > C | p.Met386Thr | No | No | Yes | No |
| 16:31488657:G:A | missense (5/5) | c.1165G > A | p.Ala389Thr | No | No | Yes | No |
| 16:31488663:A:G | missense (5/5) | c.1171A > G | p.Met391Val | No | No | Yes | No |
| 16:31488664:T:A | missense (5/5) | c.1172T > A | p.Met391Lys | No | No | Yes | No |
| 16:31488664:T:C | missense (5/5) | c.1172T > C | p.Met391Thr | No | No | Yes | No |
| 16:31488666:T:TCC | frameshift | c.1175_1176dupCC | p.Ser393fs | No | No | Yes | Yes |
| 16:31488676:C:T | missense (5/5) | c.1184C > T | p.Ala395Val | No | No | Yes | No |
| 16:31488677:C:CTCCA | frameshift | c.1188_1191dupCATC | p.Phe398fs | No | No | Yes | Yes |
| 16:31488679:C:T | missense (5/5) | c.1187C > T | p.Ser396Phe | No | No | Yes | No |
| 16:31488700:C:G | missense (5/5) | c.1208C > G | p.Thr403Arg | No | No | Yes | No |
| 16:31488712:T:C | missense (5/5) | c.1220T > C | p.Met407Thr | No | No | Yes | No |
| 16:31488714:G:T | missense (5/5) | c.1222G > T | p.Asp408Tyr | No | No | Yes | No |
| 16:31488717:A:T | missense (5/5) | c.1225A > T | p.Ile409Phe | No | No | Yes | No |
| 16:31488719:C:G | missense (5/5) | c.1227C > G | p.Ile409Met | No | No | Yes | No |
| 16:31488721:A:ACACGCGCCTGCGGC | frameshift | c.1238_1251dupTGCGGCCACGCGCC | p.Gly418fs | No | No | Yes | Yes |
| 16:31488722:C:G | stop gained | c.1230C > G | p.Tyr410* | No | No | Yes | Yes |
| 16:31488732:C:T | missense (5/5) | c.1240C > T | p.Arg414Trp | No | No | Yes | No |
| 16:31488733:G:A | missense (5/5) | c.1241G > A | p.Arg414Gln | No | No | Yes | No |
| 16:31488753:G:A | missense (5/5) | c.1261G > A | p.Glu421Lys | No | No | Yes | No |
| 16:31488755:G:C | missense (5/5) | c.1263G > C | p.Glu421Asp | No | No | Yes | No |
| 16:31488765:G:A | missense (5/5) | c.1273G > A | p.Val425Met | No | No | Yes | No |
| 16:31488773:G:A | splice donor | c.1280 + 1G > A | | No | No | Yes | Yes |
| 16:31488878:A:C | splice acceptor | c.1281 − 2A > C | | No | No | Yes | Yes |
| 16:31488882:T:G | missense (5/5) | c.1283T > G | p.Leu428Arg | No | No | Yes | No |
| 16:31488884:T:C | missense (5/5) | c.1285T > C | p.Trp429Arg | No | No | Yes | No |
| 16:31488897:T:A | missense (5/5) | c.1298T > A | p.Ile433Asn | No | No | Yes | No |
| 16:31488897:T:C | missense (5/5) | c.1298T > C | p.Ile433Thr | No | No | Yes | No |
| 16:31488899:G:A | missense (5/5) | c.1300G > A | p.Val434Met | No | No | Yes | No |
| 16:31488900:T:A | missense (5/5) | c.1301T > A | p.Val434Glu | No | No | Yes | No |
| 16:31488900:T:C | missense (5/5) | c.1301T > C | p.Val434Ala | No | No | Yes | No |
| 16:31488911:GTGGCC:G | frameshift | c.1317_1321delCTGGC | p.Trp440fs | No | No | Yes | Yes |
| 16:31488917:T:C | missense (5/5) | c.1318T > C | p.Trp440Arg | No | No | Yes | No |
| 16:31488918:G:A | stop gained | c.1319G > A | p.Trp440* | No | No | Yes | Yes |
| 16:31488923:C:T | missense (5/5) | c.1324C > T | p.Pro442Ser | No | No | Yes | No |
| 16:31488934:G:C | missense (5/5) | c.1335G > C | p.Gln445His | No | No | Yes | No |
| 16:31488942:A:G | missense (5/5) | c.1343A > G | p.Gln448Arg | No | No | Yes | No |
| 16:31488942:A:T | missense (5/5) | c.1343A > T | p.Gln448Leu | No | No | Yes | No |
| 16:31488942:A:AG | frameshift | c.1346dupG | p.Gly450fs | No | No | Yes | Yes |
| 16:31488945:G:A | missense (5/5) | c.1346G > A | p.Gly449Asp | No | No | Yes | No |
| 16:31488947:G:A | missense (5/5) | c.1348G > A | p.Gly450Arg | No | No | Yes | No |
| 16:31488948:G:A | missense (5/5) | c.1349G > A | p.Gly450Glu | No | No | Yes | No |
| 16:31488952:G:C | missense (5/5) | c.1353G > C | p.Gln451His | No | No | Yes | No |
| 16:31488965:A:T | missense (5/5) | c.1366A > T | p.Ile456Phe | No | No | Yes | No |
| 16:31488966:T:A | missense (5/5) | c.1367T > A | p.Ile456Asn | No | No | Yes | No |
| 16:31488969:A:G | missense (5/5) | c.1370A > G | p.Gln457Arg | No | No | Yes | No |
| 16:31488969:A:C | missense (5/5) | c.1370A > C | p.Gln457Pro | No | No | Yes | No |
| 16:31488970:G:T | missense (5/5) | c.1371G > T | p.Gln457His | No | No | Yes | No |
| 16:31488981:G:C | missense (5/5) | c.1382G > C | p.Ser461Thr | No | No | Yes | No |
| 16:31488983:T:C | missense (5/5) | c.1384T > C | p.Tyr462His | No | No | Yes | No |
| 16:31488983:T:G | missense (5/5) | c.1384T > G | p.Tyr462Asp | No | No | Yes | No |
| 16:31488987:T:C | missense (5/5) | c.1388T > C | p.Leu463Pro | No | No | Yes | No |
| 16:31488993:C:T | missense (5/5) | c.1394C > T | p.Pro465Leu | No | No | Yes | No |
| 16:31488995:C:T | missense (5/5) | c.1396C > T | p.Pro466Ser | No | No | Yes | No |
| 16:31489001:T:C | missense (5/5) | c.1402T > C | p.Ser468Pro | No | No | Yes | No |
| 16:31489004:G:A | missense (5/5) | c.1405G > A | p.Ala469Thr | No | No | Yes | No |
| 16:31489004:GC:G | frameshift | c.1407delC | p.Val470fs | No | No | Yes | Yes |
| 16:31489008:T:C | missense (5/5) | c.1409T > C | p.Val470Ala | No | No | Yes | No |
| 16:31489017:T:G | missense (5/5) | c.1418T > G | p.Leu473Arg | No | No | Yes | No |
| 16:31489017:T:C | missense (5/5) | c.1418T > C | p.Leu473Pro | No | No | Yes | No |
| 16:31489019:G:A | missense (5/5) | c.1420G > A | p.Ala474Thr | No | No | Yes | No |
| 16:31489034:C:T | missense (5/5) | c.1435C > T | p.Arg479Cys | No | No | Yes | No |
| 16:31489040:A:C | missense (5/5) | c.1441A > C | p.Asn481His | No | No | Yes | No |
| 16:31489044:A:G | missense (5/5) | c.1445A > G | p.Glu482Gly | No | No | Yes | No |
| 16:31489045:G:C | missense (5/5) | c.1446G > C | p.Glu482Asp | No | No | Yes | No |
| 16:31489122:G:A | splice acceptor | c.1450 − 1G > A | | No | No | Yes | Yes |
| 16:31489126:G:A | missense (5/5) | c.1453G > A | p.Ala485Thr | No | No | Yes | No |
| 16:31489130:T:C | missense (5/5) | c.1457T > C | p.Phe486Ser | No | No | Yes | No |
| 16:31489134:G:A | stop gained | c.1461G > A | p.Trp487* | No | No | Yes | Yes |
| 16:31489136:G:A | missense (5/5) | c.1463G > A | p.Gly488Glu | No | No | Yes | No |
| 16:31489148:G:T | missense (5/5) | c.1475G > T | p.Gly492Val | No | No | Yes | No |
| 16:31489151:T:G | missense (5/5) | c.1478T > G | p.Leu493Arg | No | No | Yes | No |
| 16:31489159:G:A | missense (5/5) | c.1486G > A | p.Gly496Ser | No | No | Yes | No |
| 16:31489160:G:C | missense (5/5) | c.1487G > C | p.Gly496Ala | No | No | Yes | No |
| 16:31489168:C:T | missense (5/5) | c.1495C > T | p.Arg499Cys | No | No | Yes | No |
| 16:31489180:G:T | stop gained | c.1507G > T | p.Glu503* | No | No | Yes | Yes |
| 16:31489184:T:A | missense (5/5) | c.1511T > A | p.Phe504Tyr | No | No | Yes | No |
| 16:31489193:G:GC | frameshift | c.1521dupc | p.Ser508fs | No | No | Yes | Yes |
| 16:31489198:G:C | missense (5/5) | c.1525G > C | p.Gly509Arg | No | No | Yes | No |
| 16:31489199:G:A | missense (5/5) | c.1526G > A | p.Gly509Asp | No | No | Yes | No |
| 16:31489205:G:C | missense (5/5) | c.1532G > C | p.Cys511Ser | No | No | Yes | No |
| 16:31489205:G:A | missense (5/5) | c.1532G > A | p.Cys511Tyr | No | No | Yes | No |
| 16:31489210:C:T | stop gained | c.1537C > T | p.Gln513* | No | No | Yes | Yes |
| 16:31489225:C:A | missense (5/5) | c.1552C > A | p.Pro518Thr | No | No | Yes | No |
| 16:31489226:C:G | missense (5/5) | c.1553C > G | p.Pro518Arg | No | No | Yes | No |
| 16:31489239:C:A | stop gained | c.1566C > A | p.Cys522* | No | No | Yes | Yes |
| 16:31489246:C:T | missense (5/5) | c.1573C > T | p.His525Tyr | No | No | Yes | No |
| 16:31489248:C:G | missense (5/5) | c.1575C > G | p.His525Gln | No | No | Yes | No |
| 16:31489249:T:C | missense (5/5) | c.1576T > C | p.Tyr526His | No | No | Yes | No |
| 16:31489251:C:A | stop gained | c.1578C > A | p.Tyr526* | No | No | Yes | Yes |
| 16:31489252:C:T | missense (5/5) | c.1579C > T | p.Leu527Phe | No | No | Yes | No |
| 16:31489253:T:C | missense (5/5) | c.1580T > C | p.Leu527Pro | No | No | Yes | No |
| 16:31489256:A:G | missense (5/5) | c.1583A > G | p.Tyr528Cys | No | No | Yes | No |
| 16:31489264:AT:A | frameshift | c.1593delT | p.Ile531fs | No | No | Yes | Yes |
| 16:31489271:T:C | missense (5/5) | c.1598T > C | p.Leu533Pro | No | No | Yes | No |
| 16:31489275:C:G | missense (5/5) | c.1602C > G | p.Phe534Leu | No | No | Yes | No |
| 16:31489279:T:C | missense (5/5) | c.1606T > C | p.Cys536Arg | No | No | Yes | No |
| 16:31489282:T:C | missense (5/5) | c.1609T > C | p.Ser537Pro | No | No | Yes | No |
| 16:31489291:C:T | missense (5/5) | c.1618C > T | p.Leu540Phe | No | No | Yes | No |
| 16:31489307:C:G | missense (5/5) | c.1634C > G | p.Ser545Cys | No | No | Yes | No |
| 16:31489322:C:G | missense (5/5) | c.1649C > G | p.Pro550Arg | No | No | Yes | No |
| 16:31489333:A:T | stop gained | c.1660A > T | p.Lys554* | No | No | Yes | Yes |
| 16:31489338:CG:C | splice donor | c.1665 + 1delG | | No | No | Yes | Yes |
| 16:31489339:G:C | splice donor | c.1665 + 1G > C | | No | No | Yes | Yes |
| 16:31489339:G:A | splice donor | c.1665 + 1G > A | | No | No | Yes | Yes |
| 16:31490103:G:A | splice acceptor | c.1666 − 1G > A | | No | No | Yes | Yes |
| 16:31490104:C:T | missense (5/5) | c.1666C > T | p.Leu556Phe | No | No | Yes | No |
| 16:31490110:C:T | missense (5/5) | c.1672C > T | p.Arg558Cys | No | No | Yes | No |
| 16:31490128:C:T | missense (5/5) | c.1690C > T | p.Arg564Trp | No | No | Yes | No |
| 16:31490129:G:T | missense (5/5) | c.1691G > T | p.Arg564Leu | No | No | Yes | No |
| 16:31490129:G:A | missense (5/5) | c.1691G > A | p.Arg564Gln | No | No | Yes | No |
| 16:31490146:C:T | missense (5/5) | c.1708C > T | p.Arg570Trp | No | No | Yes | No |
| 16:31490207:CAG:C | frameshift | c.1774_1775delAG | p.Ser592fs | No | No | Yes | Yes |
| 16:31490230:G:T | stop gained | c.1792G > T | p.Glu598* | No | No | Yes | Yes |
| 16:31490232:T:C | splice donor | c.1792 + 2T > C | | No | No | Yes | Yes |
| 16:31490362:G:A | missense (5/5) | c.1846G > A | p.Gly616Arg | No | No | Yes | No |
| 16:31490371:AGAGGT:A | frameshift | c.1857_1861delAGGTG | p.Val622fs | No | No | Yes | Yes |
| 16:31490449:G:A | missense (5/5) | c.1933G > A | p.Glu645Lys | No | No | Yes | No |
| 16:31490498:T:C | missense (5/5) | c.1982T > C | p.Met661Thr | No | No | Yes | No |
| 16:31490519:G:A | stop gained | c.2003G > A | p.Trp668* | No | No | Yes | Yes |
| 16:31490520:G:C | missense (5/5) | c.2004G > C | p.Trp668Cys | No | No | Yes | No |
| 16:31490521:G:A | missense (5/5) | c.2005G > A | p.Gly669Ser | No | No | Yes | No |
| 1:62597712:G:A | missense (5/5) | c.146G > A | p.Gly49Asp | Yes | No | No | No |
| 1:62597715:T:G | missense (5/5) | c.149T > G | p.Leu50Arg | Yes | No | No | No |
| 1:62597756:A:T | missense (5/5) | c.190A > T | p.Thr64Ser | Yes | No | No | No |
| 1:62597915:T:G | missense (5/5) | c.349T > G | p.Ser117Ala | Yes | No | No | No |
| 1:62597970:A:G | missense (5/5) | c.404A > G | p.Gln135Arg | Yes | No | No | No |
| 1:62598003:CTAACT:C | frameshift | c.441_445delCTTAA | p.Leu148fs | Yes | Yes | No | No |
| 1:62598700:T:C | missense (5/5) | c.500T > C | p.Phe167Ser | Yes | No | No | No |
| 1:62598775:A:G | missense (5/5) | c.575A > G | p.Gln192Arg | Yes | No | No | No |
| 1:62601132:GC:G | frameshift | c.659delC | p.Pro220fs | Yes | Yes | No | No |
| 1:62601153:T:TC | frameshift | c.681dupC | p.Phe228fs | Yes | Yes | No | No |
| 1:62601168:GA:G | frameshift | c.695delA | p.Asn232fs | Yes | Yes | No | No |
| 1:62601883:G:C | splice donor | c.835 + 1G > C | | Yes | Yes | No | No |
| 1:62602367:TG:T | frameshift | c.921delG | p.Arg308fs | Yes | Yes | No | No |
| 1:62603967:A:G | splice acceptor | c.932 − 2A > G | | Yes | Yes | No | No |
| 1:62604046:G:T | missense (5/5) | c.1009G > T | p.Asp337Tyr | Yes | No | No | No |
| 1:62604691:A:AC | frameshift | c.1259dupc | p.Arg421fs | Yes | Yes | No | No |
| 1:62604767:A:AT | frameshift | c.1333_1334insT | p.Lys445fs | Yes | Yes | No | No |
| 16:31483201:A:G | missense (5/5) | c.65A > G | p.Asn22Ser | No | No | Yes | No |
| 16:31484674:C:A | missense (5/5) | c.128C > A | p.Ser43Tyr | No | No | Yes | No |
| 16:31484736:T:C | missense (5/5) | c.190T > C | p.Trp64Arg | No | No | Yes | No |
| 16:31484818:G:C | splice acceptor | c.199 − 1G > C | | No | No | Yes | Yes |
| 16:31484820:T:A | missense (5/5) | c.200T > A | p.Val67Asp | No | No | Yes | No |
| 16:31484901:C:A | missense (5/5) | c.281C > A | p.Ala94Asp | No | No | Yes | No |
| 16:31485756:T:C | missense (5/5) | c.331T > C | p.Trp111Arg | No | No | Yes | No |
| 16:31485758:G:A | stop gained | c.333G > A | p.Trp111* | No | No | Yes | Yes |
| 16:31485789:G:T | missense (5/5) | c.364G > T | p.Val122Phe | No | No | Yes | No |
| 16:31485871:T:C | missense (5/5) | c.446T > C | p.Leu149Pro | No | No | Yes | No |
| 16:31485894:G:T | splice donor | c.468 + 1G > T | | No | No | Yes | Yes |
| 16:31487322:G:C | missense (5/5) | c.577G > C | p.Gly193Arg | No | No | Yes | No |
| 16:31487324:G:GC | frameshift | c.580dupC | p.Leu194fs | No | No | Yes | Yes |
| 16:31487364:G:T | missense (5/5) | c.619G > T | p.Val207Phe | No | No | Yes | No |
| 16:31487659:C:T | missense (5/5) | c.785C > T | p.Ser262Phe | No | No | Yes | No |
| 16:31487671:T:C | missense (5/5) | c.797T > C | p.Leu266Pro | No | No | Yes | No |
| 16:31487729:C:G | missense (5/5) | c.855C > G | p.Ile285Met | No | No | Yes | No |
| 16:31487748:T:C | missense (5/5) | c.874T > C | p.Cys292Arg | No | No | Yes | No |
| 16:31488044:G:C | missense (5/5) | c.892G > C | p.Val298Leu | No | No | Yes | No |
| 16:31488072:T:C | missense (5/5) | c.920T > C | p.Leu307Pro | No | No | Yes | No |
| 16:31488164:C:G | missense (5/5) | c.1012C > G | p.Leu338Val | No | No | Yes | No |
| 16:31488385:G:T | stop gained | c.1024G > T | p.Glu342* | No | No | Yes | Yes |
| 16:31488386:A:T | missense (5/5) | c.1025A > T | p.Glu342Val | No | No | Yes | No |
| 16:31488388:G:T | missense (5/5) | c.1027G > T | p.Val343Leu | No | No | Yes | No |
| 16:31488443:G:A | missense (5/5) | c.1082G > A | p.Cys361Tyr | No | No | Yes | No |
| 16:31488466:C:T | missense (5/5) | c.1105C > T | p.Leu369Phe | No | No | Yes | No |
| 16:31488642:G:C | missense (5/5) | c.1150G > C | p.Ala384Pro | No | No | Yes | No |
| 16:31488643:C:A | missense (5/5) | c.1151C > A | p.Ala384Glu | No | No | Yes | No |
| 16:31488652:T:C | missense (5/5) | c.1160T > C | p.Leu387Pro | No | No | Yes | No |
| 16:31488654:G:A | missense (5/5) | c.1162G > A | p.Ala388Thr | No | No | Yes | No |
| 16:31488691:G:A | missense (5/5) | c.1199G > A | p.Ser400Asn | No | No | Yes | No |
| 16:31488709:C:T | missense (5/5) | c.1217C > T | p.Thr406Ile | No | No | Yes | No |
| 16:31488741:G:A | missense (5/5) | c.1249G > A | p.Ala417Thr | No | No | Yes | No |
| 16:31488757:T:C | missense (5/5) | c.1265T > C | p.Leu422Pro | No | No | Yes | No |
| 16:31488774:T:G | splice donor | c.1280 + 2T > G | | No | No | Yes | Yes |
| 16:31488879:G:A | splice acceptor | c.1281 − 1G > A | | No | No | Yes | Yes |
| 16:31488915:C:A | missense (5/5) | c.1316C > A | p.Ala439Asp | No | No | Yes | No |
| 16:31488945:G:C | missense (5/5) | c.1346G > C | p.Gly449Ala | No | No | Yes | No |
| 16:31488958:C:A | missense (5/5) | c.1359C > A | p.Phe453Leu | No | No | Yes | No |
| 16:31488976:C:CTCTA | frameshift | c.1378_1381dupTCTA | p.Ser461fs | No | No | Yes | Yes |
| 16:31489142:TC:T | frameshift | c.1470delC | p.Ile490fs | No | No | Yes | Yes |
| 16:31489145:G:A | missense (5/5) | c.1472G > A | p.Gly491Glu | No | No | Yes | No |
| 16:31489163:T:C | missense (5/5) | c.1490T > C | p.Leu497Pro | No | No | Yes | No |
| 16:31489166:C:A | missense (5/5) | c.1493C > A | p.Ala498Glu | No | No | Yes | No |
| 16:31489249:T:A | missense (5/5) | c.1576T > A | p.Tyr526Asn | No | No | Yes | No |
| 16:31489250:A:G | missense (5/5) | c.1577A > G | p.Tyr526Cys | No | No | Yes | No |
| 16:31489264:A:T | missense (5/5) | c.1591A > T | p.Ile531Phe | No | No | Yes | No |
| 16:31489270:CTG:C | frameshift | c.1599_1600delGT | p.Phe534fs | No | No | Yes | Yes |
| 16:31489275:C:CTT | frameshift | c.1603_1604dupTT | p.Cys536fs | No | No | Yes | Yes |
| 16:31490231:G:C | splice donor | c.1792 + 1G > C | | No | No | Yes | Yes |
| 1:62597596:TG:T | frameshift | c.31delG | p.Val11fs | Yes | Yes | No | No |
| 1:62597674:A:T | missense (5/5) | c.108A > T | p.Arg36Ser | Yes | No | No | No |
| 1:62597685:T:C | missense (5/5) | c.119T > C | p.Leu40Ser | Yes | No | No | No |
| 1:62597691:A:T | missense (5/5) | c.125A > T | p.Asp42Val | Yes | No | No | No |
| 1:62597715:T:A | missense (5/5) | c.149T > A | p.Leu50His | Yes | No | No | No |
| 1:62597717:C:G | missense (5/5) | c.151C > G | p.Leu51Val | Yes | No | No | No |
| 1:62597736:T:A | missense (5/5) | c.170T > A | p.Leu57His | Yes | No | No | No |
| 1:62597736:T:G | missense (5/5) | c.170T > G | p.Leu57Arg | Yes | No | No | No |
| 1:62597747:G:A | missense (5/5) | c.181G > A | p.Val61Ile | Yes | No | No | No |
| 1:62597754:A:T | missense (5/5) | c.188A > T | p.Lys63Met | Yes | No | No | No |
| 1:62597757:C:A | missense (5/5) | c.191C > A | p.Thr64Lys | Yes | No | No | No |
| 1:62597766:A:C | missense (5/5) | c.200A > C | p.Gln67Pro | Yes | No | No | No |
| 1:62597801:G:T | missense (5/5) | c.235G > T | p.Asp79Tyr | Yes | No | No | No |
| 1:62597885:C:T | stop gained | c.319C > T | p.Gln107* | Yes | Yes | No | No |
| 1:62598753:C:T | stop gained | c.553C > T | p.Gln185* | Yes | Yes | No | No |
| 1:62598807:G:T | splice donor | c.606 + 1G > T | | Yes | Yes | No | No |
| 1:62601092:CT:C | frameshift | c.618delT | p.Ser207fs | Yes | Yes | No | No |
| 1:62601197:G:T | splice donor | c.721 + 1G > T | | Yes | Yes | No | No |
| 1:62601198:T:C | splice donor | c.721 + 2T > c | | Yes | Yes | No | No |
| 1:62601783:T:C | missense (5/5) | c.736T > C | p.Cys246Arg | Yes | No | No | No |
| 1:62601802:G:GAGGT | frameshift | c.756_759dupAGGT | p.Glu254fs | Yes | Yes | No | No |
| 1:62601866:CTG:C | frameshift | c.822_823delTG | p.Cys274fs | Yes | Yes | No | No |
| 1:62602295:G:A | stop gained | c.846G > A | p.Trp282* | Yes | Yes | No | No |
| 1:62602297:C:CA | frameshift | c.849dupA | p.Leu284fs | Yes | Yes | No | No |
| 1:62602305:C:A | missense (5/5) | c.856C > A | p.Gln286Lys | Yes | No | No | No |
| 1:62602332:T:C | missense (5/5) | c.883T > C | p.Phe295Leu | Yes | No | No | No |
| 1:62602382:T:C | splice donor | c.931 + 2T > C | | Yes | Yes | No | No |
| 1:62604005:T:G | missense (5/5) | c.968T > G | p.Ile323Arg | Yes | No | No | No |
| 1:62604173:T:G | missense (5/5) | c.1136T > G | p.Leu379Trp | Yes | No | No | No |
| 1:62604174:G:C | missense (5/5) | c.1137G > C | p.Leu379Phe | Yes | No | No | No |
| 1:62604174:GGT:G | frameshift | c.1140_1141delGT | p.Ser382fs | Yes | Yes | No | No |
| 1:62604185:C:G | missense (5/5) | c.1148C > G | p.Thr383Ser | Yes | No | No | No |
| 1:62604224:AG:A | frameshift | c.1190delG | p.Gly397fs | Yes | Yes | No | No |
| 1:62604635:G:A | missense (5/5) | c.1201G > A | p.Gly401Ser | Yes | No | No | No |
| 1:62604643:G:C | missense (5/5) | c.1209G > C | p.Trp403Cys | Yes | No | No | No |
| 1:62604685:T:A | stop gained | c.1251T > A | p.Tyr417* | Yes | Yes | No | No |
| 1:62604726:G:A | missense (5/5) | c.1292G > A | p.Gly431Glu | Yes | No | No | No |
| 1:62604734:TG:T | frameshift | c.1302delG | p.Trp434fs | Yes | Yes | No | No |
| 1:62604735:G:T | missense (5/5) | c.1301G > T | p.Trp434Leu | Yes | No | No | No |
| 1:62604737:A:G | missense (5/5) | c.1303A > G | p.Lys435Glu | Yes | No | No | No |
| 1:62604768:A:G | missense (5/5) | c.1334A > G | p.Lys445Arg | Yes | No | No | No |
| 1:62604780:T:C | missense (5/5) | c.1346T > C | p.Met449Thr | Yes | No | No | No |
| 1:62604815:T:G | stop lost | c.1381T > G | p.Ter461Glyext*? | Yes | Yes | No | No |
| 16:31483138:T:G | start lost | c.2T > G | p.Met1? | No | No | Yes | Yes |
| 16:31483219:T:C | missense (5/5) | c.83T > C | p.Val28Ala | No | No | Yes | No |
| 16:31483248:G:C | missense (5/5) | c.112G > C | p.Gly38Arg | No | No | Yes | No |
| 16:31484732:G:C | missense (5/5) | c.186G > C | p.Met62Ile | No | No | Yes | No |
| 16:31484735:G:GTGGTGGC | frameshift | c.190_196dupTGGTGGC | p.Pro66fs | No | No | Yes | Yes |
| 16:31484737:G:A | stop gained | c.191G > A | p.Trp64* | No | No | Yes | Yes |
| 16:31484743:C:G | missense (5/5) | c.197C > G | p.Pro66Arg | No | No | Yes | No |
| 16:31484833:CTT:C | frameshift | c.214_215delTT | p.Phe72fs | No | No | Yes | Yes |
| 16:31484847:T:C | missense (5/5) | c.227T > C | p.Ile76Thr | No | No | Yes | No |
| 16:31484860:CT:C | frameshift | c.243delT | p.Phe81fs | No | No | Yes | Yes |
| 16:31484873:G:A | missense (5/5) | c.253G > A | p.Ala85Thr | No | No | Yes | No |
| 16:31484901:C:T | missense (5/5) | c.281C > T | p.Ala94Val | No | No | Yes | No |
| 16:31484914:C:G | missense (5/5) | c.294C > G | p.Phe98Leu | No | No | Yes | No |
| 16:31484915:G:C | missense (5/5) | c.295G > C | p.Glu99Gln | No | No | Yes | No |
| 16:31485771:G:C | missense (5/5) | c.346G > C | p.Val116Leu | No | No | Yes | No |
| 16:31485780:ACAGCGGGGGTCAT:A | frameshift | c.358_370delGCGGGGGTCATCA | p.Ala120fs | No | No | Yes | Yes |
| 16:31485796:C:G | missense (5/5) | c.371C > G | p.Thr124Arg | No | No | Yes | No |
| 16:31485849:C:G | missense (5/5) | c.424C > G | p.Leu142Val | No | No | Yes | No |
| 16:31485892:C:T | missense (5/5) | c.467C > T | p.Ser156Leu | No | No | Yes | No |
| 16:31486260:AT:A | frameshift | c.562delT | p.Tyr188fs | No | No | Yes | Yes |
| 16:31486261:T:TGC | frameshift | c.560_561insGC | p.Ile187fs | No | No | Yes | Yes |
| 16:31486263:T:G | missense (5/5) | c.562T > G | p.Tyr188Asp | No | No | Yes | No |
| 16:31486264:A:G | missense (5/5) | c.563A > G | p.Tyr188Cys | No | No | Yes | No |
| 16:31487346:G:A | missense (5/5) | c.601G > A | p.Asp201Asn | No | No | Yes | No |
| 16:31487350:C:T | missense (5/5) | c.605C > T | p.Thr202Met | No | No | Yes | No |
| 16:31487400:G:A | missense (5/5) | c.655G > A | p.Ala219Thr | No | No | Yes | No |
| 16:31487538:G:T | stop gained | c.664G > T | p.Glu222* | No | No | Yes | Yes |
| 16:31487541:G:A | missense (5/5) | c.667G > A | p.Val223Met | No | No | Yes | No |
| 16:31487542:TG:T | frameshift | c.671delG | p.Gly224fs | No | No | Yes | Yes |
| 16:31487647:C:G | missense (5/5) | c.773C > G | p.Pro258Arg | No | No | Yes | No |
| 16:31487719:G:A | missense (5/5) | c.845G > A | p.Gly282Glu | No | No | Yes | No |
| 16:31487746:G:A | stop gained | c.872G > A | p.Trp291* | No | No | Yes | Yes |
| 16:31487757:C:T | stop gained | c.883C > T | p.Gln295* | No | No | Yes | Yes |
| 16:31487758:A:C | missense (5/5) | c.884A > C | p.Gln295Pro | No | No | Yes | No |
| 16:31488034:GTA:G | splice acceptor | c.886 − 3_886 − 2delTA | | No | No | Yes | Yes |
| 16:31488044:G:T | missense (5/5) | c.892G > T | p.Val298Leu | No | No | Yes | No |
| 16:31488062:G:T | missense (5/5) | c.910G > T | p.Gly304Trp | No | No | Yes | No |
| 16:31488063:G:A | missense (5/5) | c.911G > A | p.Gly304Glu | No | No | Yes | No |
| 16:31488084:A:G | missense (5/5) | c.932A > G | p.Lys311Arg | No | No | Yes | No |
| 16:31488099:T:C | missense (5/5) | c.947T > C | p.Leu316Pro | No | No | Yes | No |
| 16:31488135:T:A | missense (5/5) | c.983T > A | p.Met328Lys | No | No | Yes | No |
| 16:31488153:T:C | missense (5/5) | c.1001T > C | p.Ile334Thr | No | No | Yes | No |
| 16:31488382:G:A | splice acceptor | c.1022 − 1G > A | | No | No | Yes | Yes |
| 16:31488427:G:C | missense (5/5) | c.1066G > C | p.Gly356Arg | No | No | Yes | No |
| 16:31488442:T:G | missense (5/5) | c.1081T > G | p.Cys361Gly | No | No | Yes | No |
| 16:31488450:C:A | missense (5/5) | c.1089C > A | p.Asn363Lys | No | No | Yes | No |
| 16:31488633:C:T | missense (5/5) | c.1141C > T | p.Leu381Phe | No | No | Yes | No |
| 16:31488642:G:A | missense (5/5) | c.1150G > A | p.Ala384Thr | No | No | Yes | No |
| 16:31488652:T:A | missense (5/5) | c.1160T > A | p.Leu387Gln | No | No | Yes | No |
| 16:31488690:A:G | missense (5/5) | c.1198A > G | p.Ser400Gly | No | No | Yes | No |
| 16:31488692:C:A | missense (5/5) | c.1200C > A | p.Ser400Arg | No | No | Yes | No |
| 16:31488717:AT:A | frameshift | c.1226delT | p.Ile409fs | No | No | Yes | Yes |
| 16:31488720:T:C | missense (5/5) | c.1228T > C | p.Tyr410His | No | No | Yes | No |
| 16:31488721:ACACGCGCCTGCGGC:A | frameshift | c.1238_1251delTGCGGCCACGCGCC | p.Leu413fs | No | No | Yes | Yes |
| 16:31488733:G:T | missense (5/5) | c.1241G > T | p.Arg414Leu | No | No | Yes | No |
| 16:31488772:G:C | missense (5/5) | c.1280G > C | p.Arg427Pro | No | No | Yes | No |
| 16:31488774:T:C | splice donor | c.1280 + 2T > C | | No | No | Yes | Yes |
| 16:31488888:TG:T | frameshift | c.1291delG | p.Val431fs | No | No | Yes | Yes |
| 16:31488900:TG:T | frameshift | c.1303delG | p.Val435fs | No | No | Yes | Yes |
| 16:31488917:T:G | missense (5/5) | c.1318T > G | p.Trp440Gly | No | No | Yes | No |
| 16:31488930:T:C | missense (5/5) | c.1331T > C | p.Val444Ala | No | No | Yes | No |
| 16:31488948:G:T | missense (5/5) | c.1349G > T | p.Gly450Val | No | No | Yes | No |
| 16:31488957:T:G | missense (5/5) | c.1358T > G | p.Phe453Cys | No | No | Yes | No |
| 16:31488982:C:G | missense (5/5) | c.1383C > G | p.Ser461Arg | No | No | Yes | No |
| 16:31488992:C:G | missense (5/5) | c.1393C > G | p.Pro465Ala | No | No | Yes | No |
| 16:31489022:C:T | missense (5/5) | c.1423C > T | p.Leu475Phe | No | No | Yes | No |
| 16:31489042:T:A | missense (5/5) | c.1443T > A | p.Asn481Lys | No | No | Yes | No |
| 16:31489123:G:C | missense (5/5) | c.1450G > C | p.Gly484Arg | No | No | Yes | No |
| 16:31489124:G:C | missense (5/5) | c.1451G > C | p.Gly484Ala | No | No | Yes | No |
| 16:31489133:G:C | missense (5/5) | c.1460G > C | p.Trp487Ser | No | No | Yes | No |
| 16:31489148:G:A | missense (5/5) | c.1475G > A | p.Gly492Asp | No | No | Yes | No |
| 16:31489151:T:C | missense (5/5) | c.1478T > C | p.Leu493Pro | No | No | Yes | No |
| 16:31489227:AGCTTTCCTCTGCGGCGTGCACT:A | frameshift | c.1555_1576delGCTTTCCTCTGCGGCGTGCACT | p.Ala519fs | No | No | Yes | Yes |
| 16:31489247:A:G | missense (5/5) | c.1574A > G | p.His525Arg | No | No | Yes | No |
| 16:31490146:CG:C | frameshift | c.1711delG | p.Glu571fs | No | No | Yes | Yes |
| 16:31490306:C:CA | splice acceptor | c.1793 − 2dupA | | No | No | Yes | Yes |
| 16:31490307:A:G | splice acceptor | c.1793 − 2A > G | | No | No | Yes | Yes |
| 16:31490346:C:A | stop gained | c.1830C > A | p.Cys610* | No | No | Yes | Yes |
| 16:31490462:G:A | stop gained | c.1946G > A | p.Trp649* | No | No | Yes | Yes |
| 16:31490463:G:A | stop gained | c.1947G > A | p.Trp649* | No | No | Yes | Yes |
| 16:31490518:TG:T | frameshift | c.2006delG | p.Gly669fs | No | No | Yes | Yes |
| 16:31490520:G:A | stop gained | c.2004G > A | p.Trp668* | No | No | Yes | Yes |
| 1:62597678:G:C | missense (5/5) | c.112G > C | p.Ala38Pro | Yes | No | No | No |
| 1:62597741:G:C | missense (5/5) | c.175G > C | p.Asp59His | Yes | No | No | No |
| 1:62597808:CT:C | frameshift | c.247delT | p.Tyr83fs | Yes | Yes | No | No |
| 1:62597936:C:CT | frameshift | c.372dupT | p.Glu125fs | Yes | Yes | No | No |
| 1:62598003:C:CT | frameshift | c.438dupT | p.Asn147fs | Yes | Yes | No | No |
| 1:62598712:A:G | missense (5/5) | c.512A > G | p.Gln171Arg | Yes | No | No | No |
| 1:62601817:G:C | missense (5/5) | c.770G > C | p.Ser257Thr | Yes | No | No | No |
| 1:62602311:C:G | missense (5/5) | c.862C > G | p.Arg288Gly | Yes | No | No | No |
| 1:62602341:AC:A | frameshift | c.893delC | p.Thr298fs | Yes | Yes | No | No |
| 1:62604014:A:T | missense (5/5) | c.977A > T | p.Gln326Leu | Yes | No | No | No |
| 1:62604073:G:T | stop gained | c.1036G > T | p.Glu346* | Yes | Yes | No | No |
| 1:62604078:T:G | stop gained | c.1041T > G | p.Tyr347* | Yes | Yes | No | No |
| 1:62604116:T:C | missense (5/5) | c.1079T > C | p.Leu360Pro | Yes | No | No | No |
| 1:62604672:TAA:T | frameshift | c.1240_1241delAA | p.Asn414fs | Yes | Yes | No | No |
| 16:31484736:T:G | missense (5/5) | c.190T > G | p.Trp64Gly | No | No | Yes | No |
| 16:31485801:C:T | missense (5/5) | c.376C > T | p.Pro126Ser | No | No | Yes | No |
| 16:31485804:C:T | stop gained | c.379C > T | p.Gln127* | No | No | Yes | Yes |
| 16:31485810:C:G | missense (5/5) | c.385C > G | p.Leu129Val | No | No | Yes | No |
| 16:31486213:G:T | missense (5/5) | c.512G > T | p.Gly171Val | No | No | Yes | No |
| 16:31486252:T:C | missense (5/5) | c.551T > C | p.Ile184Thr | No | No | Yes | No |
| 16:31486266:A:G | missense (5/5) | c.565A > G | p.Thr189Ala | No | No | Yes | No |
| 16:31487331:G:A | missense (5/5) | c.586G > A | p.Ala196Thr | No | No | Yes | No |
| 16:31487338:T:G | missense (5/5) | c.593T > G | p.Met198Arg | No | No | Yes | No |
| 16:31487638:G:A | missense (5/5) | c.764G > A | p.Cys255Tyr | No | No | Yes | No |
| 16:31487719:G:GACTC | frameshift | c.848_851dupTCAC | p.Ile285fs | No | No | Yes | Yes |
| 16:31487728:T:C | missense (5/5) | c.854T > C | p.Ile285Thr | No | No | Yes | No |
| 16:31488089:G:C | missense (5/5) | c.937G > C | p.Gly313Arg | No | No | Yes | No |
| 16:31488104:G:C | missense (5/5) | c.952G > C | p.Gly318Arg | No | No | Yes | No |
| 16:31488143:C:T | missense (5/5) | c.991C > T | p.Pro331Ser | No | No | Yes | No |
| 16:31488173:G:C | missense (5/5) | c.1021G > C | p.Asp341His | No | No | Yes | No |
| 16:31488492:T:C | splice donor | c.1129 + 2T > C | | No | No | Yes | Yes |
| 16:31488643:CGGTCATGCTG:C | frameshift | c.1153_1162delGTCATGCTGG | p.Val385fs | No | No | Yes | Yes |
| 16:31488730:TGCGGCCACGCGCCG:T | frameshift | c.1242_1255delGCCACGCGCCGGCG | p.Gly418fs | No | No | Yes | Yes |
| 16:31488757:T:G | missense (5/5) | c.1265T > G | p.Leu422Arg | No | No | Yes | No |
| 16:31488765:G:T | missense (5/5) | c.1273G > T | p.Val425Leu | No | No | Yes | No |
| 16:31488922:TC:T | frameshift | c.1326delC | p.Val443fs | No | No | Yes | Yes |
| 16:31488923:C:A | missense (5/5) | c.1324C > A | p.Pro442Thr | No | No | Yes | No |
| 16:31488992:C:T | missense (5/5) | c.1393C > T | p.Pro465Ser | No | No | Yes | No |
| 16:31488993:C:G | missense (5/5) | c.1394C > G | p.Pro465Arg | No | No | Yes | No |
| 16:31489008:T:A | missense (5/5) | c.1409T > A | p.Val470Asp | No | No | Yes | No |
| 16:31489041:A:G | missense (5/5) | c.1442A > G | p.Asn481Ser | No | No | Yes | No |
| 16:31489217:C:T | missense (5/5) | c.1544C > T | p.Ser515Leu | No | No | Yes | No |
| 16:31489339:G:T | splice donor | c.1665 + 1G > T | | No | No | Yes | Yes |
| 16:31490354:G:C | missense (5/5) | c.1838G > C | p.Trp613Ser | No | No | Yes | No |
| 16:31490360:G:C | missense (5/5) | c.1844G > C | p.Cys615Ser | No | No | Yes | No |
| 16:31490437:G:T | stop gained | c.1921G > T | p.Glu641* | No | No | Yes | Yes |
| 16:31490525:T:C | missense (5/5) | c.2009T > C | p.Phe670Ser | No | No | Yes | No |
| 16:31490530:GC:G | frameshift | c.2016delC | p.Ter673fs | No | No | Yes | Yes |

C:P:R:A indicates the genomic coordinates of the genetic variant including chromosome (C), physical genomic position in base pairs (P), reference allele (R) and alternative allele (A) relative to build 38 of the Human Genome sequence by the Human Genome Reference Consortium. Coding DNA and protein changes follow the Human Genome Variation Society nomenclature and refer to ANGPTL3 or SLC5A2 transcript (ENST00000371129 or ENST00000330498, respectively), annotated in the in the Ensembl database (see, world-wide web at “useast.ensembl.org/index.html”). ‘Missense (5/5)’ and ‘5/5 ms’ indicate missense variants predicted to be damaging by 5 in silico algorithms. pLOF indicates predicted loss of function variant. The right four columns indicate whether the variant was included in gene burden grouping specified, with alternate aIlele frequency (AAF) thresholds <1% for pLOF variants and <0.1% for pLOF or 5/5 missense variants.

### Example 4: General Methods

### Participating Cohorts

[0184] The UKB is a population-based cohort study of people aged between 40 and 69 years recruited through 22 testing centers in the UK between 2006-2010 (Sudlow et al., PLoS Med, 2015. 12, e1001779). A total of 431,835 participants from UKB with available whole-exome sequencing and phenotype data were included. The MyCode Community Health Initiative cohort from the Geisinger Health System (GHS) (Carey et al., Genet. Med., 2016, 18, 906-913) is a health system-based cohort of patients from Central and Eastern Pennsylvania (USA) recruited in 2007-2019. A total of 156,846 participants from GHS with available whole-exome sequencing and phenotype data were included. The Mount Sinai's BioMe Personalized Medicine Cohort (SINAI) (Gottesman et al., Genet. Med., 2013, 15, 761-771) is an electronic health record-linked clinical care cohort of 25,839 individuals with available whole-exome sequencing and phenotype data. The University of Pennsylvania Medicine BioBank (UPENN-PMBB) is a health system-based cohort based in Pennsylvania BioBank (Park et al., Nat. Med., 2021, 27, 66-72). The Malmö Diet and Cancer Study (MDCS) is a cohort study based in Malmo, Sweden (Berglund et al., J. Intern. Med., 1993, 233, 45-51). The MCPS is a prospective, population-based study based in Mexico (Tapia-Conyer et al., Int. J. Epidemiol., 2006 35, 243-49).

### Phenotype Definitions

[0185] eGFR was calculated from clinical laboratory measurements for creatinine extracted from electronic health records (EHRs) of participants from GHS, SINAI and UPENN-PMBB. Median values were calculated for all participants with two or more measurements. In UKB, eGFR was calculated from creatinine measured on a Beckman Coulter AU5800 clinical chemistry analyzer and cystatin measured by immunoturbidimetric analysis on a Siemens Advia 1800 clinical chemistry analyzer; both creatinine and cystatin were measured at the baseline visit of the study. In MCPS, eGFR was calculated from creatinine measured via nucleic magnetic resonance spectroscopy and converted into clinical units as previously described (Aguilar-Ramirez et al., J. Clin. Endo. Met., 2021, 106, 2828-2839). The Chronic Kidney Disease Epidemiology Collaboration equations for creatinine and cystatin (UKB) or creatinine (all other cohorts) were used to calculate eGFR. Prior to genetic association analysis, eGFR values were transformed by the inverse standard normal function, applied within each ancestry group and separately in men and women.

### Genotype Data

[0186] High coverage whole exome sequencing was performed as previously described (Science, 2021, 373:abf8683; and Nature, 2020, 586:749-756) and as summarized below. NimbleGen probes (VCRome; for part of the GHS cohort) or a modified version of the xGen design available from Integrated DNA Technologies (IDT; for the rest of GHS and other cohorts) were used for target sequence capture of the exome. A unique 6 base pair (bp) barcode (VCRome) or 10 bp barcode (IDT) was added to each DNA fragment during library preparation to facilitate multiplexed exome capture and sequencing. Equal amounts of sample were pooled prior to exome capture. Sequencing was performed using 75 bp paired-end reads on Illumina v4 HiSeq 2500 (for part of the GHS cohort) or NovaSeq (for the rest of GHS and other cohorts) instruments. Sequencing had a coverage depth (i.e., number of sequence-reads covering each nucleotide in the target areas of the genome) sufficient to provide greater than 20× coverage over 85% of targeted bases in 96% of VCRome samples and 20× coverage over 90% of targeted bases in 99% of IDT samples. Data processing steps included sample de-multiplexing using Illumina software, alignment to the GRCh38 Human Genome reference sequence including generation of binary alignment and mapping files (BAM), processing of BAM files (e.g., marking of duplicate reads and other read mapping evaluations). Variant calling was performed using the GLNexus system (DOI: 10.1101/343970). Variant mapping and annotation were based on the GRCh38 Human Genome reference sequence and Ensembl v85 gene definitions using the snpEff software. The snpEff predictions that involve protein-coding transcripts with an annotated start and stop were then combined into a single functional impact prediction by selecting the most deleterious functional effect class for each gene. The hierarchy (from most to least deleterious) for these annotations was frameshift, stop-gain, stop-loss, splice acceptor, splice donor, stop-lost, in-frame indel, missense, other annotations. Predicted LOF genetic variants included: a) insertions or deletions resulting in a frameshift, b) insertions, deletions or single nucleotide variants resulting in the introduction of a premature stop codon or in the loss of the transcription start site or stop site, and c) variants in donor or acceptor splice sites. Missense variants were classified for likely functional impact according to the number of in silico prediction algorithms that predicted deleteriousness using SIFT (Adzhubei et al., Nat. Methods, 2010, 7, 248-9) and Polyphen2_HVAR (Adzhubei et al., Nat. Methods, 2010, 7, 248-9), LRT (Chun et al., Genome Res., 2009, 19, 1553-61) and MutationTaster (Schwarz et al., Nat. Methods, 2010, 7, 575-6). For each gene, the alternative allele frequency (AAF) and functional annotation of each variant determined inclusion into 7 gene burden exposures: 1) pLOF variants with AAF<1%; 2) pLOF or missense variants predicted deleterious by 5/5 algorithms with AAF<1%; 3) pLOF or missense variants predicted deleterious by 5/5 algorithms with AAF<0.1%; 4) pLOF or missense variants predicted deleterious by at least 1/5 algorithms with AAF<1%; 5) pLOF or missense variants predicted deleterious by at least 1/5 algorithms with AAF<0.1%; 6) pLOF or any missense with AAF<1%; 7) pLOF or any missense variants with AAF<0.1%.

[0187] Association analysis of gene burden of rare pLOF and missense variations We tested for association between the burden of rare predicted loss-of-function or missense variants in a given gene and eGFR by fitting a linear regression model adjusted for a polygenic score that approximates a genomic kinship matrix using REGENIE (Mbatchou et al., Nat. Genetics, 2021, 53, 1097-1103). Analyses were stratified by ancestry and adjusted for age, age², sex, age-by-sex and age²-by-sex interaction terms, experimental batch-related covariates, 10 common variant-derived principal components, and 20 rare variant-derived principal components. Results across cohorts for each variant-phenotype association were combined using fixed effects inverse variance weighted meta-analysis. In gene burden tests, all individuals are labeled as heterozygotes if they carry one or more qualifying rare variant (as described above based on frequency and functional annotation) and as homozygotes if they carry any qualifying variant in the homozygous state. This “composite genotype” is then used to test for association. The burden exposure with the strongest association with eGFR as well as the burden of pLOF variants with AAF<1% were taken forward for further analysis.

[0188] To examine whether the effects of ANGPTL3 gene burdens on eGFR varied depending on SLC5A2 gene burdens and vice versa, we took two approaches. First, we adjusted for the second gene burden by including it as a covariate in the linear regression model between the first gene burden and eGFR. We compared these results to those from the linear regression model between the first gene burden and eGFR, without adjustment for the second gene burden. Second, we performed a formal interaction analysis of eGFR using a linear regression model fit with the ANGPTL3 gene burden, the SLC5A2 gene burden, and an interaction term of ANGPTL3*SLC5A2 gene burdens. The p-value of interaction term allows assessment of whether the effect of the ANGPTL3 gene burden is significantly different among different genotypes of the SLC5A2 gene burden (and vice versa). Both analyses were performed as described in the previous paragraph, substituting a modified REGENIE polygenic score that excluded both chromosomes containing the ANGPTL3 and SLC5A2 genes.

[0189] Various modifications of the described subject matter, in addition to those described herein, will be apparent to those skilled in the art from the foregoing description. Such modifications are also intended to fall within the scope of the appended claims. Each reference (including, but not limited to, journal articles, U.S. and non-U.S. patents, patent application publications, international patent application publications, gene bank accession numbers, and the like) cited in the present application is incorporated herein by reference in its entirety and for all purposes.

The application's sequence listing, which the Patent Office published only in electronic form, follows.

SEQUENCE LISTING (3916 sequences)

SEQ ID NO: 1 - RNA, 20 nt, synthetic construct
  source 1..20: mol_type = other RNA
acgtggaactgttttcttct

SEQ ID NO: 2 - RNA, 20 nt, synthetic construct
  source 1..20: mol_type = other RNA
aacgtggaactgttttcttc

SEQ ID NO: 3 - RNA, 20 nt, synthetic construct
  source 1..20: mol_type = other RNA
caacgtggaactgttttctt

SEQ ID NO: 4 - RNA, 20 nt, synthetic construct
  source 1..20: mol_type = other RNA
gcaacgtggaactgttttct

SEQ ID NO: 5 - RNA, 20 nt, synthetic construct
  source 1..20: mol_type = other RNA
aagcaacgtggaactgtttt

SEQ ID NO: 6 - RNA, 20 nt, synthetic construct
  source 1..20: mol_type = other RNA
caagcaacgtggaactgttt

SEQ ID NO: 7 - RNA, 20 nt, synthetic construct
  source 1..20: mol_type = other RNA
tcaagcaacgtggaactgtt

SEQ ID NO: 8 - RNA, 20 nt, synthetic construct
  source 1..20: mol_type = other RNA
tttcaagcaacgtggaactg

SEQ ID NO: 9 - RNA, 20 nt, synthetic construct
  source 1..20: mol_type = other RNA
atttcaagcaacgtggaact

SEQ ID NO: 10 - RNA, 20 nt, synthetic construct
  source 1..20: mol_type = other RNA
aatttcaagcaacgtggaac

SEQ ID NO: 11 - RNA, 20 nt, synthetic construct
  source 1..20: mol_type = other RNA
caatttcaagcaacgtggaa

SEQ ID NO: 12 - RNA, 20 nt, synthetic construct
  source 1..20: mol_type = other RNA
tcaatttcaagcaacgtgga

SEQ ID NO: 13 - RNA, 20 nt, synthetic construct
  source 1..20: mol_type = other RNA
tctggaggaaataactagag

SEQ ID NO: 14 - RNA, 20 nt, synthetic construct
  source 1..20: mol_type = other RNA
gattttggctctggagatag

SEQ ID NO: 15 - RNA, 20 nt, synthetic construct
  source 1..20: mol_type = other RNA
tgattttggctctggagata

SEQ ID NO: 16 - RNA, 20 nt, synthetic construct
  source 1..20: mol_type = other RNA
ttgattttggctctggagat

SEQ ID NO: 17 - RNA, 20 nt, synthetic construct
  source 1..20: mol_type = other RNA
aaggaggccattggctaaaa

SEQ ID NO: 18 - RNA, 20 nt, synthetic construct
  source 1..20: mol_type = other RNA
gaaggaggccattggctaaa

SEQ ID NO: 19 - RNA, 20 nt, synthetic construct
  source 1..20: mol_type = other RNA
ctgaaggaggccattggcta

SEQ ID NO: 20 - RNA, 20 nt, synthetic construct
  source 1..20: mol_type = other RNA
aactgaaggaggccattggc

SEQ ID NO: 21 - RNA, 20 nt, synthetic construct
  source 1..20: mol_type = other RNA
gtcccaactgaaggaggcca

SEQ ID NO: 22 - RNA, 20 nt, synthetic construct
  source 1..20: mol_type = other RNA
atgtcccaactgaaggaggc

SEQ ID NO: 23 - RNA, 20 nt, synthetic construct
  source 1..20: mol_type = other RNA
gaccatgtcccaactgaagg

SEQ ID NO: 24 - RNA, 20 nt, synthetic construct
  source 1..20: mol_type = other RNA
agaccatgtcccaactgaag

SEQ ID NO: 25 - RNA, 20 nt, synthetic construct
  source 1..20: mol_type = other RNA
aagaccatgtcccaactgaa

SEQ ID NO: 26 - RNA, 20 nt, synthetic construct
  source 1..20: mol_type = other RNA
taagaccatgtcccaactga

SEQ ID NO: 27 - RNA, 20 nt, synthetic construct
  source 1..20: mol_type = other RNA
ttaagaccatgtcccaactg

SEQ ID NO: 28 - RNA, 20 nt, synthetic construct
  source 1..20: mol_type = other RNA
tttaagaccatgtcccaact

SEQ ID NO: 29 - RNA, 20 nt, synthetic construct
  source 1..20: mol_type = other RNA
ctttaagaccatgtcccaac

SEQ ID NO: 30 - RNA, 20 nt, synthetic construct
  source 1..20: mol_type = other RNA
tctttaagaccatgtcccaa

SEQ ID NO: 31 - RNA, 20 nt, synthetic construct
  source 1..20: mol_type = other RNA
cgtcttatggacaaagtctt

SEQ ID NO: 32 - RNA, 20 nt, synthetic construct
  source 1..20: mol_type = other RNA
tcgtcttatggacaaagtct

SEQ ID NO: 33 - RNA, 20 nt, synthetic construct
  source 1..20: mol_type = other RNA
ttcgtcttatggacaaagtc

SEQ ID NO: 34 - RNA, 20 nt, synthetic construct
  source 1..20: mol_type = other RNA
cttcgtcttatggacaaagt

SEQ ID NO: 35 - RNA, 20 nt, synthetic construct
  source 1..20: mol_type = other RNA
ccttcgtcttatggacaaag

SEQ ID NO: 36 - RNA, 20 nt, synthetic construct
  source 1..20: mol_type = other RNA
cccttcgtcttatggacaaa

SEQ ID NO: 37 - RNA, 20 nt, synthetic construct
  source 1..20: mol_type = other RNA
gcccttcgtcttatggacaa

SEQ ID NO: 38 - RNA, 20 nt, synthetic construct
  source 1..20: mol_type = other RNA
ggcccttcgtcttatggaca

SEQ ID NO: 39 - RNA, 20 nt, synthetic construct
  source 1..20: mol_type = other RNA
tggcccttcgtcttatggac

SEQ ID NO: 40 - RNA, 20 nt, synthetic construct
  source 1..20: mol_type = other RNA
ttggcccttcgtcttatgga

SEQ ID NO: 41 - RNA, 20 nt, synthetic construct
  source 1..20: mol_type = other RNA
tttggcccttcgtcttatgg

SEQ ID NO: 42 - RNA, 20 nt, synthetic construct
  source 1..20: mol_type = other RNA
atttggcccttcgtcttatg

SEQ ID NO: 43 - RNA, 20 nt, synthetic construct
  source 1..20: mol_type = other RNA
aatttggcccttcgtcttat

SEQ ID NO: 44 - RNA, 20 nt, synthetic construct
  source 1..20: mol_type = other RNA
taatttggcccttcgtctta

SEQ ID NO: 45 - RNA, 20 nt, synthetic construct
  source 1..20: mol_type = other RNA
ttaatttggcccttcgtctt

SEQ ID NO: 46 - RNA, 20 nt, synthetic construct
  source 1..20: mol_type = other RNA
gtttgcagcgatagatcata

SEQ ID NO: 47 - RNA, 20 nt, synthetic construct
  source 1..20: mol_type = other RNA
ggtttgcagcgatagatcat

SEQ ID NO: 48 - RNA, 20 nt, synthetic construct
  source 1..20: mol_type = other RNA
tggtttgcagcgatagatca

SEQ ID NO: 49 - RNA, 20 nt, synthetic construct
  source 1..20: mol_type = other RNA
ctggtttgcagcgatagatc

SEQ ID NO: 50 - RNA, 20 nt, synthetic construct
  source 1..20: mol_type = other RNA
actggtttgcagcgatagat

SEQ ID NO: 51 - RNA, 20 nt, synthetic construct
  source 1..20: mol_type = other RNA
cactggtttgcagcgataga

SEQ ID NO: 52 - RNA, 20 nt, synthetic construct
  source 1..20: mol_type = other RNA
tcactggtttgcagcgatag

SEQ ID NO: 53 - RNA, 20 nt, synthetic construct
  source 1..20: mol_type = other RNA
ttcactggtttgcagcgata

SEQ ID NO: 54 - RNA, 20 nt, synthetic construct
  source 1..20: mol_type = other RNA
atttcactggtttgcagcga

SEQ ID NO: 55 - RNA, 20 nt, synthetic construct
  source 1..20: mol_type = other RNA
gatttcactggtttgcagcg

SEQ ID NO: 56 - RNA, 20 nt, synthetic construct
  source 1..20: mol_type = other RNA
ttgatttcactggtttgcag

SEQ ID NO: 57 - RNA, 20 nt, synthetic construct
  source 1..20: mol_type = other RNA
ctcagttccttttcttcttc

SEQ ID NO: 58 - RNA, 20 nt, synthetic construct
  source 1..20: mol_type = other RNA
gagttgagttcaagtgacat

SEQ ID NO: 59 - RNA, 20 nt, synthetic construct
  source 1..20: mol_type = other RNA
tgagttgagttcaagtgaca

SEQ ID NO: 60 - RNA, 20 nt, synthetic construct
  source 1..20: mol_type = other RNA
ctggagtttcaggttgattt

SEQ ID NO: 61 - RNA, 20 nt, synthetic construct
  source 1..20: mol_type = other RNA
tctggagtttcaggttgatt

SEQ ID NO: 62 - RNA, 20 nt, synthetic construct
  source 1..20: mol_type = other RNA
gttctggagtttcaggttga

SEQ ID NO: 63 - RNA, 20 nt, synthetic construct
  source 1..20: mol_type = other RNA
ggtgttctggagtttcaggt

SEQ ID NO: 64 - RNA, 20 nt, synthetic construct
  source 1..20: mol_type = other RNA
gggtgttctggagtttcagg

SEQ ID NO: 65 - RNA, 20 nt, synthetic construct
  source 1..20: mol_type = other RNA
aagttacttctgggtgttct

SEQ ID NO: 66 - RNA, 20 nt, synthetic construct
  source 1..20: mol_type = other RNA
ggagaaggtctttgatgcta

SEQ ID NO: 67 - RNA, 20 nt, synthetic construct
  source 1..20: mol_type = other RNA
tggagaaggtctttgatgct

SEQ ID NO: 68 - RNA, 20 nt, synthetic construct
  source 1..20: mol_type = other RNA
ctggagaaggtctttgatgc

SEQ ID NO: 69 - RNA, 20 nt, synthetic construct
  source 1..20: mol_type = other RNA
ggtctggagaaggtctttga

SEQ ID NO: 70 - RNA, 20 nt, synthetic construct
  source 1..20: mol_type = other RNA
cggtctggagaaggtctttg

SEQ ID NO: 71 - RNA, 20 nt, synthetic construct
  source 1..20: mol_type = other RNA
acggtctggagaaggtcttt

SEQ ID NO: 72 - RNA, 20 nt, synthetic construct
  source 1..20: mol_type = other RNA
ccacggtctggagaaggtct

SEQ ID NO: 73 - RNA, 20 nt, synthetic construct
  source 1..20: mol_type = other RNA
attggtcttccacggtctgg

SEQ ID NO: 74 - RNA, 20 nt, synthetic construct
  source 1..20: mol_type = other RNA
tattggtcttccacggtctg

SEQ ID NO: 75 - RNA, 20 nt, synthetic construct
  source 1..20: mol_type = other RNA
atattggtcttccacggtct

SEQ ID NO: 76 - RNA, 20 nt, synthetic construct
  source 1..20: mol_type = other RNA
ttatattggtcttccacggt

SEQ ID NO: 77 - RNA, 20 nt, synthetic construct
  source 1..20: mol_type = other RNA
tttatattggtcttccacgg

SEQ ID NO: 78 - RNA, 20 nt, synthetic construct
  source 1..20: mol_type = other RNA
gtttatattggtcttccacg

SEQ ID NO: 79 - RNA, 20 nt, synthetic construct
  source 1..20: mol_type = other RNA
gtccttctgagctgattttc

SEQ ID NO: 80 - RNA, 20 nt, synthetic construct
  source 1..20: mol_type = other RNA
agtccttctgagctgatttt

SEQ ID NO: 81 - RNA, 20 nt, synthetic construct
  source 1..20: mol_type = other RNA
ctagtccttctgagctgatt

SEQ ID NO: 82 - RNA, 20 nt, synthetic construct
  source 1..20: mol_type = other RNA
tgtgggttcttgaatactag

SEQ ID NO: 83 - RNA, 20 nt, synthetic construct
  source 1..20: mol_type = other RNA
ctgtgggttcttgaatacta

SEQ ID NO: 84 - RNA, 20 nt, synthetic construct
  source 1..20: mol_type = other RNA
ttctgtgggttcttgaatac

SEQ ID NO: 85 - RNA, 20 nt, synthetic construct
  source 1..20: mol_type = other RNA
tggcttggaagatagagaaa

SEQ ID NO: 86 - RNA, 20 nt, synthetic construct
  source 1..20: mol_type = other RNA
cttggcttggaagatagaga

SEQ ID NO: 87 - RNA, 20 nt, synthetic construct
  source 1..20: mol_type = other RNA
agttcttggtgctcttggct

SEQ ID NO: 88 - RNA, 20 nt, synthetic construct
  source 1..20: mol_type = other RNA
tagttcttggtgctcttggc

SEQ ID NO: 89 - RNA, 20 nt, synthetic construct
  source 1..20: mol_type = other RNA
gtagttcttggtgctcttgg

SEQ ID NO: 90 - RNA, 20 nt, synthetic construct
  source 1..20: mol_type = other RNA
gagtagttcttggtgctctt

SEQ ID NO: 91 - RNA, 20 nt, synthetic construct
  source 1..20: mol_type = other RNA
ggagtagttcttggtgctct

SEQ ID NO: 92 - RNA, 20 nt, synthetic construct
  source 1..20: mol_type = other RNA
gggagtagttcttggtgctc

SEQ ID NO: 93 - RNA, 20 nt, synthetic construct
  source 1..20: mol_type = other RNA
agggagtagttcttggtgct

SEQ ID NO: 94 - RNA, 20 nt, synthetic construct
  source 1..20: mol_type = other RNA
aaagggagtagttcttggtg

SEQ ID NO: 95 - RNA, 20 nt, synthetic construct
  source 1..20: mol_type = other RNA
gaaagggagtagttcttggt

SEQ ID NO: 96 - RNA, 20 nt, synthetic construct
  source 1..20: mol_type = other RNA
caactgaagaaagggagtag

SEQ ID NO: 97 - RNA, 20 nt, synthetic construct
  source 1..20: mol_type = other RNA
tcaactgaagaaagggagta

SEQ ID NO: 98 - RNA, 20 nt, synthetic construct
  source 1..20: mol_type = other RNA
ttcaactgaagaaagggagt

SEQ ID NO: 99 - RNA, 20 nt, synthetic construct
  source 1..20: mol_type = other RNA
agcaggaatgccatcatgtt

SEQ ID NO: 100 - RNA, 20 nt, synthetic construct
  source 1..20: mol_type = other RNA
cagcaggaatgccatcatgt

SEQ ID NO: 101 - RNA, 20 nt, synthetic construct
  source 1..20: mol_type = other RNA
tcagcaggaatgccatcatg

SEQ ID NO: 102 - RNA, 20 nt, synthetic construct
  source 1..20: mol_type = other RNA
ttcagcaggaatgccatcat

SEQ ID NO: 103 - RNA, 20 nt, synthetic construct
  source 1..20: mol_type = other RNA
ggtggtacattcagcaggaa

SEQ ID NO: 104 - RNA, 20 nt, synthetic construct
  source 1..20: mol_type = other RNA
tggtggtacattcagcagga

SEQ ID NO: 105 - RNA, 20 nt, synthetic construct
  source 1..20: mol_type = other RNA
cttgtatgttcacctctgtt

SEQ ID NO: 106 - RNA, 20 nt, synthetic construct
  source 1..20: mol_type = other RNA
ccacttgtatgttcacctct

SEQ ID NO: 107 - RNA, 20 nt, synthetic construct
  source 1..20: mol_type = other RNA
gccacttgtatgttcacctc

SEQ ID NO: 108 - RNA, 20 nt, synthetic construct
  source 1..20: mol_type = other RNA
tgccacttgtatgttcacct

SEQ ID NO: 109 - RNA, 20 nt, synthetic construct
  source 1..20: mol_type = other RNA
gttgctgggtctgatggcat

SEQ ID NO: 110 - RNA, 20 nt, synthetic construct
  source 1..20: mol_type = other RNA
gagttgctgggtctgatggc

SEQ ID NO: 111 - RNA, 20 nt, synthetic construct
  source 1..20: mol_type = other RNA
gagagttgctgggtctgatg

SEQ ID NO: 112 - RNA, 20 nt, synthetic construct
  source 1..20: mol_type = other RNA
acttgagagttgctgggtct

SEQ ID NO: 113 - RNA, 20 nt, synthetic construct
  source 1..20: mol_type = other RNA
ggactacctgatataacatc

SEQ ID NO: 114 - RNA, 20 nt, synthetic construct
  source 1..20: mol_type = other RNA
catggactacctgatataac

SEQ ID NO: 115 - RNA, 20 nt, synthetic construct
  source 1..20: mol_type = other RNA
cccacgtttcattgaagttt

SEQ ID NO: 116 - RNA, 20 nt, synthetic construct
  source 1..20: mol_type = other RNA
tcccacgtttcattgaagtt

SEQ ID NO: 117 - RNA, 20 nt, synthetic construct
  source 1..20: mol_type = other RNA
ctcccacgtttcattgaagt

SEQ ID NO: 118 - RNA, 20 nt, synthetic construct
  source 1..20: mol_type = other RNA
tctcccacgtttcattgaag

SEQ ID NO: 119 - RNA, 20 nt, synthetic construct
  source 1..20: mol_type = other RNA
ttctcccacgtttcattgaa

SEQ ID NO: 120 - RNA, 20 nt, synthetic construct
  source 1..20: mol_type = other RNA
gttctcccacgtttcattga

SEQ ID NO: 121 - RNA, 20 nt, synthetic construct
  source 1..20: mol_type = other RNA
agttctcccacgtttcattg

SEQ ID NO: 122 - RNA, 20 nt, synthetic construct
  source 1..20: mol_type = other RNA
tagttctcccacgtttcatt

SEQ ID NO: 123 - RNA, 20 nt, synthetic construct
  source 1..20: mol_type = other RNA
gtagttctcccacgtttcat

SEQ ID NO: 124 - RNA, 20 nt, synthetic construct
  source 1..20: mol_type = other RNA
tgtagttctcccacgtttca

SEQ ID NO: 125 - RNA, 20 nt, synthetic construct
  source 1..20: mol_type = other RNA
ttgtagttctcccacgtttc

SEQ ID NO: 126 - RNA, 20 nt, synthetic construct
  source 1..20: mol_type = other RNA
tttgtagttctcccacgttt

SEQ ID NO: 127 - RNA, 20 nt, synthetic construct
  source 1..20: mol_type = other RNA
atttgtagttctcccacgtt

SEQ ID NO: 128 - RNA, 20 nt, synthetic construct
  source 1..20: mol_type = other RNA
tatttgtagttctcccacgt

SEQ ID NO: 129 - RNA, 20 nt, synthetic construct
  source 1..20: mol_type = other RNA
atatttgtagttctcccacg

SEQ ID NO: 130 - RNA, 20 nt, synthetic construct
  source 1..20: mol_type = other RNA
accatatttgtagttctccc

SEQ ID NO: 131 - RNA, 20 nt, synthetic construct
  source 1..20: mol_type = other RNA
agcctcccaaaaccatattt

SEQ ID NO: 132 - RNA, 20 nt, synthetic construct
  source 1..20: mol_type = other RNA
aagcctcccaaaaccatatt

SEQ ID NO: 133 - RNA, 20 nt, synthetic construct
  source 1..20: mol_type = other RNA
caagcctcccaaaaccatat

SEQ ID NO: 134 - RNA, 20 nt, synthetic construct
  source 1..20: mol_type = other RNA
tcaagcctcccaaaaccata

SEQ ID NO: 135 - RNA, 20 nt, synthetic construct
  source 1..20: mol_type = other RNA
atcaagcctcccaaaaccat

SEQ ID NO: 136 - RNA, 20 nt, synthetic construct
  source 1..20: mol_type = other RNA
catcaagcctcccaaaacca

SEQ ID NO: 137 - RNA, 20 nt, synthetic construct
  source 1..20: mol_type = other RNA
ccatcaagcctcccaaaacc

SEQ ID NO: 138 - RNA, 20 nt, synthetic construct
  source 1..20: mol_type = other RNA
ctccatcaagcctcccaaaa

SEQ ID NO: 139 - RNA, 20 nt, synthetic construct
  source 1..20: mol_type = other RNA
tctccatcaagcctcccaaa

SEQ ID NO: 140 - RNA, 20 nt, synthetic construct
  source 1..20: mol_type = other RNA
aattctccatcaagcctccc

SEQ ID NO: 141 - RNA, 20 nt, synthetic construct
  source 1..20: mol_type = other RNA
aaattctccatcaagcctcc

SEQ ID NO: 142 - RNA, 20 nt, synthetic construct
  source 1..20: mol_type = other RNA
aaaattctccatcaagcctc

SEQ ID NO: 143 - RNA, 20 nt, synthetic construct
  source 1..20: mol_type = other RNA
ccaaaattctccatcaagcc

SEQ ID NO: 144 - RNA, 20 nt, synthetic construct
  source 1..20: mol_type = other RNA
accaaaattctccatcaagc

SEQ ID NO: 145 - RNA, 20 nt, synthetic construct
  source 1..20: mol_type = other RNA
ccaaccaaaattctccatca

SEQ ID NO: 146 - RNA, 20 nt, synthetic construct
  source 1..20: mol_type = other RNA
cccaaccaaaattctccatc

SEQ ID NO: 147 - RNA, 20 nt, synthetic construct
  source 1..20: mol_type = other RNA
gcccaaccaaaattctccat

SEQ ID NO: 148 - RNA, 20 nt, synthetic construct
  source 1..20: mol_type = other RNA
ggcccaaccaaaattctcca

SEQ ID NO: 149 - RNA, 20 nt, synthetic construct
  source 1..20: mol_type = other RNA
aggcccaaccaaaattctcc

SEQ ID NO: 150 - RNA, 20 nt, synthetic construct
  source 1..20: mol_type = other RNA
taggcccaaccaaaattctc

SEQ ID NO: 151 - RNA, 20 nt, synthetic construct
  source 1..20: mol_type = other RNA
tctaggcccaaccaaaattc

SEQ ID NO: 152 - RNA, 20 nt, synthetic construct
  source 1..20: mol_type = other RNA
ctctaggcccaaccaaaatt

SEQ ID NO: 153 - RNA, 20 nt, synthetic construct
  source 1..20: mol_type = other RNA
tctctaggcccaaccaaaat

SEQ ID NO: 154 - RNA, 20 nt, synthetic construct
  source 1..20: mol_type = other RNA
ttctctaggcccaaccaaaa

SEQ ID NO: 155 - RNA, 20 nt, synthetic construct
  source 1..20: mol_type = other RNA
cttctctaggcccaaccaaa

SEQ ID NO: 156 - RNA, 20 nt, synthetic construct
  source 1..20: mol_type = other RNA
tcttctctaggcccaaccaa

SEQ ID NO: 157 - RNA, 20 nt, synthetic construct
  source 1..20: mol_type = other RNA
tatcttctctaggcccaacc

SEQ ID NO: 158 - RNA, 20 nt, synthetic construct
  source 1..20: mol_type = other RNA
atatcttctctaggcccaac

SEQ ID NO: 159 - RNA, 20 nt, synthetic construct
  source 1..20: mol_type = other RNA
tatatcttctctaggcccaa

SEQ ID NO: 160 - RNA, 20 nt, synthetic construct
  source 1..20: mol_type = other RNA
gtatatcttctctaggccca

SEQ ID NO: 161 - RNA, 20 nt, synthetic construct
  source 1..20: mol_type = other RNA
agtatatcttctctaggccc

SEQ ID NO: 162 - RNA, 20 nt, synthetic construct
  source 1..20: mol_type = other RNA
gagtatatcttctctaggcc

SEQ ID NO: 163 - RNA, 20 nt, synthetic construct
  source 1..20: mol_type = other RNA
ggagtatatcttctctaggc

SEQ ID NO: 164 - RNA, 20 nt, synthetic construct
  source 1..20: mol_type = other RNA
tggagtatatcttctctagg

SEQ ID NO: 165 - RNA, 20 nt, synthetic construct
  source 1..20: mol_type = other RNA
gcttcactatggagtatatc

SEQ ID NO: 166 - RNA, 20 nt, synthetic construct
  source 1..20: mol_type = other RNA
agattgcttcactatggagt

SEQ ID NO: 167 - RNA, 20 nt, synthetic construct
  source 1..20: mol_type = other RNA
tagattgcttcactatggag

SEQ ID NO: 168 - RNA, 20 nt, synthetic construct
  source 1..20: mol_type = other RNA
gttgtctttccagtcttcca

SEQ ID NO: 169 - RNA, 20 nt, synthetic construct
  source 1..20: mol_type = other RNA
tgtttgttgtctttccagtc

SEQ ID NO: 170 - RNA, 20 nt, synthetic construct
  source 1..20: mol_type = other RNA
gtttcgtgatttcccaagta

SEQ ID NO: 171 - RNA, 20 nt, synthetic construct
  source 1..20: mol_type = other RNA
ggtttcgtgatttcccaagt

SEQ ID NO: 172 - RNA, 20 nt, synthetic construct
  source 1..20: mol_type = other RNA
gttggtttcgtgatttccca

SEQ ID NO: 173 - RNA, 20 nt, synthetic construct
  source 1..20: mol_type = other RNA
agttggtttcgtgatttccc

SEQ ID NO: 174 - RNA, 20 nt, synthetic construct
  source 1..20: mol_type = other RNA
tagttggtttcgtgatttcc

SEQ ID NO: 175 - RNA, 20 nt, synthetic construct
  source 1..20: mol_type = other RNA
cgtatagttggtttcgtgat

SEQ ID NO: 176 - RNA, 20 nt, synthetic construct
  source 1..20: mol_type = other RNA
gcgtatagttggtttcgtga

SEQ ID NO: 177 - RNA, 20 nt, synthetic construct
  source 1..20: mol_type = other RNA
agcgtatagttggtttcgtg

SEQ ID NO: 178 - RNA, 20 nt, synthetic construct
  source 1..20: mol_type = other RNA
tagcgtatagttggtttcgt

SEQ ID NO: 179 - RNA, 20 nt, synthetic construct
  source 1..20: mol_type = other RNA
gtagcgtatagttggtttcg

SEQ ID NO: 180 - RNA, 20 nt, synthetic construct
  source 1..20: mol_type = other RNA
tgtagcgtatagttggtttc

SEQ ID NO: 181 - RNA, 20 nt, synthetic construct
  source 1..20: mol_type = other RNA
agatgtagcgtatagttggt

SEQ ID NO: 182 - RNA, 20 nt, synthetic construct
  source 1..20: mol_type = other RNA
ctagatgtagcgtatagttg

SEQ ID NO: 183 - RNA, 20 nt, synthetic construct
  source 1..20: mol_type = other RNA
caactagatgtagcgtatag

SEQ ID NO: 184 - RNA, 20 nt, synthetic construct
  source 1..20: mol_type = other RNA
gcaactagatgtagcgtata

SEQ ID NO: 185 - RNA, 20 nt, synthetic construct
  source 1..20: mol_type = other RNA
cgcaactagatgtagcgtat

SEQ ID NO: 186 - RNA, 20 nt, synthetic construct
  source 1..20: mol_type = other RNA
tcgcaactagatgtagcgta

SEQ ID NO: 187 - RNA, 20 nt, synthetic construct
  source 1..20: mol_type = other RNA
atcgcaactagatgtagcgt

SEQ ID NO: 188 - RNA, 20 nt, synthetic construct
  source 1..20: mol_type = other RNA
aatcgcaactagatgtagcg

SEQ ID NO: 189 - RNA, 20 nt, synthetic construct
  source 1..20: mol_type = other RNA
taatcgcaactagatgtagc

SEQ ID NO: 190 - RNA, 20 nt, synthetic construct
  source 1..20: mol_type = other RNA
gtaatcgcaactagatgtag

SEQ ID NO: 191 - RNA, 20 nt, synthetic construct
  source 1..20: mol_type = other RNA
cagtaatcgcaactagatgt

SEQ ID NO: 192 - RNA, 20 nt, synthetic construct
  source 1..20: mol_type = other RNA
ggacattgccagtaatcgca

SEQ ID NO: 193 - RNA, 20 nt, synthetic construct
  source 1..20: mol_type = other RNA
gggacattgccagtaatcgc

SEQ ID NO: 194 - RNA, 20 nt, synthetic construct
  source 1..20: mol_type = other RNA
ttttccgggattgcattggg

SEQ ID NO: 195 - RNA, 20 nt, synthetic construct
  source 1..20: mol_type = other RNA
gttttccgggattgcattgg

SEQ ID NO: 196 - RNA, 20 nt, synthetic construct
  source 1..20: mol_type = other RNA
tgttttccgggattgcattg

SEQ ID NO: 197 - RNA, 20 nt, synthetic construct
  source 1..20: mol_type = other RNA
ttgttttccgggattgcatt

SEQ ID NO: 198 - RNA, 20 nt, synthetic construct
  source 1..20: mol_type = other RNA
tttgttttccgggattgcat

SEQ ID NO: 199 - RNA, 20 nt, synthetic construct
  source 1..20: mol_type = other RNA
ctttgttttccgggattgca

SEQ ID NO: 200 - RNA, 20 nt, synthetic construct
  source 1..20: mol_type = other RNA
tctttgttttccgggattgc

SEQ ID NO: 201 - RNA, 20 nt, synthetic construct
  source 1..20: mol_type = other RNA
atctttgttttccgggattg

SEQ ID NO: 202 - RNA, 20 nt, synthetic construct
  source 1..20: mol_type = other RNA
caaatctttgttttccggga

SEQ ID NO: 203 - RNA, 20 nt, synthetic construct
  source 1..20: mol_type = other RNA
caccaaatctttgttttccg

SEQ ID NO: 204 - RNA, 20 nt, synthetic construct
  source 1..20: mol_type = other RNA
cccaagtagaaaacaccaaa

SEQ ID NO: 205 - RNA, 20 nt, synthetic construct
  source 1..20: mol_type = other RNA
tcccaagtagaaaacaccaa

SEQ ID NO: 206 - RNA, 20 nt, synthetic construct
  source 1..20: mol_type = other RNA
ctttgtgatcccaagtagaa

SEQ ID NO: 207 - RNA, 20 nt, synthetic construct
  source 1..20: mol_type = other RNA
tgctttgtgatcccaagtag

SEQ ID NO: 208 - RNA, 20 nt, synthetic construct
  source 1..20: mol_type = other RNA
tttgctttgtgatcccaagt

SEQ ID NO: 209 - RNA, 20 nt, synthetic construct
  source 1..20: mol_type = other RNA
cttttgctttgtgatcccaa

SEQ ID NO: 210 - RNA, 20 nt, synthetic construct
  source 1..20: mol_type = other RNA
ccttttgctttgtgatccca

SEQ ID NO: 211 - RNA, 20 nt, synthetic construct
  source 1..20: mol_type = other RNA
gtccttttgctttgtgatcc

SEQ ID NO: 212 - RNA, 20 nt, synthetic construct
  source 1..20: mol_type = other RNA
tgtccttttgctttgtgatc

SEQ ID NO: 213 - RNA, 20 nt, synthetic construct
  source 1..20: mol_type = other RNA
gttgaagtgtccttttgctt

SEQ ID NO: 214 - RNA, 20 nt, synthetic construct
  source 1..20: mol_type = other RNA
agttgaagtgtccttttgct

SEQ ID NO: 215 - RNA, 20 nt, synthetic construct
  source 1..20: mol_type = other RNA
cagttgaagtgtccttttgc

SEQ ID NO: 216 - RNA, 20 nt, synthetic construct
  source 1..20: mol_type = other RNA
cctctggacagttgaagtgt

SEQ ID NO: 217 - RNA, 20 nt, synthetic construct
  source 1..20: mol_type = other RNA
aaccctctggacagttgaag

SEQ ID NO: 218 - RNA, 20 nt, synthetic construct
  source 1..20: mol_type = other RNA
taaccctctggacagttgaa

SEQ ID NO: 219 - RNA, 20 nt, synthetic construct
  source 1..20: mol_type = other RNA
ataaccctctggacagttga

SEQ ID NO: 220 - RNA, 20 nt, synthetic construct
  source 1..20: mol_type = other RNA
aataaccctctggacagttg

SEQ ID NO: 221 - RNA, 20 nt, synthetic construct
  source 1..20: mol_type = other RNA
gaataaccctctggacagtt

SEQ ID NO: 222 - RNA, 20 nt, synthetic construct
  source 1..20: mol_type = other RNA
tgaataaccctctggacagt

SEQ ID NO: 223 - RNA, 20 nt, synthetic construct
  source 1..20: mol_type = other RNA
ctcctgaataaccctctgga

SEQ ID NO: 224 - RNA, 20 nt, synthetic construct
  source 1..20: mol_type = other RNA
cctcctgaataaccctctgg

SEQ ID NO: 225 - RNA, 20 nt, synthetic construct
  source 1..20: mol_type = other RNA
agcctcctgaataaccctct

SEQ ID NO: 226 - RNA, 20 nt, synthetic construct
  source 1..20: mol_type = other RNA
cagcctcctgaataaccctc

SEQ ID NO: 227 - RNA, 20 nt, synthetic construct
  source 1..20: mol_type = other RNA
ccagcctcctgaataaccct

SEQ ID NO: 228 - RNA, 20 nt, synthetic construct
  source 1..20: mol_type = other RNA
accagcctcctgaataaccc

SEQ ID NO: 229 - RNA, 20 nt, synthetic construct
  source 1..20: mol_type = other RNA
ccaccagcctcctgaataac

SEQ ID NO: 230 - RNA, 20 nt, synthetic construct
  source 1..20: mol_type = other RNA
accaccagcctcctgaataa

SEQ ID NO: 231 - RNA, 20 nt, synthetic construct
  source 1..20: mol_type = other RNA
caccaccagcctcctgaata

SEQ ID NO: 232 - RNA, 20 nt, synthetic construct
  source 1..20: mol_type = other RNA
actcatcatgccaccaccag

SEQ ID NO: 233 - RNA, 20 nt, synthetic construct
  source 1..20: mol_type = other RNA
cactcatcatgccaccacca

SEQ ID NO: 234 - RNA, 20 nt, synthetic construct
  source 1..20: mol_type = other RNA
cacactcatcatgccaccac

SEQ ID NO: 235 - RNA, 20 nt, synthetic construct
  source 1..20: mol_type = other RNA
tccacactcatcatgccacc

SEQ ID NO: 236 - RNA, 20 nt, synthetic construct
  source 1..20: mol_type = other RNA
tctccacactcatcatgcca

SEQ ID NO: 237 - RNA, 20 nt, synthetic construct
  source 1..20: mol_type = other RNA
ttaggttgttttctccacac

SEQ ID NO: 238 - RNA, 20 nt, synthetic construct
  source 1..20: mol_type = other RNA
gcttagattttgctcttggt

SEQ ID NO: 239 - RNA, 20 nt, synthetic construct
  source 1..20: mol_type = other RNA
ggcttagattttgctcttgg

SEQ ID NO: 240 - RNA, 20 nt, synthetic construct
  source 1..20: mol_type = other RNA
cctctctggcttagattttg

SEQ ID NO: 241 - RNA, 20 nt, synthetic construct
  source 1..20: mol_type = other RNA
tcctctctggcttagatttt

SEQ ID NO: 242 - RNA, 20 nt, synthetic construct
  source 1..20: mol_type = other RNA
ctcctctctggcttagattt

SEQ ID NO: 243 - RNA, 20 nt, synthetic construct
  source 1..20: mol_type = other RNA
gacttccaagataatcctct

SEQ ID NO: 244 - RNA, 20 nt, synthetic construct
  source 1..20: mol_type = other RNA
agacttccaagataatcctc

SEQ ID NO: 245 - RNA, 20 nt, synthetic construct
  source 1..20: mol_type = other RNA
gagacttccaagataatcct

SEQ ID NO: 246 - RNA, 20 nt, synthetic construct
  source 1..20: mol_type = other RNA
tgagacttccaagataatcc

SEQ ID NO: 247 - RNA, 20 nt, synthetic construct
  source 1..20: mol_type = other RNA
gaatctgttggatggatcaa

SEQ ID NO: 248 - RNA, 20 nt, synthetic construct
  source 1..20: mol_type = other RNA
tgaatctgttggatggatca

SEQ ID NO: 249 - RNA, 20 nt, synthetic construct
  source 1..20: mol_type = other RNA
gcctcagttcattcaaagct

SEQ ID NO: 250 - RNA, 20 nt, synthetic construct
  source 1..20: mol_type = other RNA
tgcctcagttcattcaaagc

SEQ ID NO: 251 - RNA, 20 nt, synthetic construct
  source 1..20: mol_type = other RNA
gggaaagttgtgatattagc

SEQ ID NO: 252 - RNA, 20 nt, synthetic construct
  source 1..20: mol_type = other RNA
cagtcctctgtatttagtca

SEQ ID NO: 253 - RNA, 20 nt, synthetic construct
  source 1..20: mol_type = other RNA
ccagtcctctgtatttagtc

SEQ ID NO: 254 - RNA, 20 nt, synthetic construct
  source 1..20: mol_type = other RNA
taccagtcctctgtatttag

SEQ ID NO: 255 - RNA, 20 nt, synthetic construct
  source 1..20: mol_type = other RNA
caattaccagtcctctgtat

SEQ ID NO: 256 - RNA, 20 nt, synthetic construct
  source 1..20: mol_type = other RNA
acaattaccagtcctctgta

SEQ ID NO: 257 - RNA, 20 nt, synthetic construct
  source 1..20: mol_type = other RNA
gtacaattaccagtcctctg

SEQ ID NO: 258 - RNA, 20 nt, synthetic construct
  source 1..20: mol_type = other RNA
tactctgtgctgacgatttt

SEQ ID NO: 259 - RNA, 20 nt, synthetic construct
  source 1..20: mol_type = other RNA
atactctgtgctgacgattt

SEQ ID NO: 260 - RNA, 20 nt, synthetic construct
  source 1..20: mol_type = other RNA
catactctgtgctgacgatt

SEQ ID NO: 261 - RNA, 20 nt, synthetic construct
  source 1..20: mol_type = other RNA
gaatcacagcatatttaggg

SEQ ID NO: 262 - RNA, 20 nt, synthetic construct
  source 1..20: mol_type = other RNA
cttgaaaacctacacgaatg

SEQ ID NO: 263 - RNA, 20 nt, synthetic construct
  source 1..20: mol_type = other RNA
ctacttgaaaacctacacga

SEQ ID NO: 264 - RNA, 20 nt, synthetic construct
  source 1..20: mol_type = other RNA
tctacttgaaaacctacacg

SEQ ID NO: 265 - RNA, 20 nt, synthetic construct
  source 1..20: mol_type = other RNA
atacatgcttgtcaggctgt

SEQ ID NO: 266 - RNA, 20 nt, synthetic construct
  source 1..20: mol_type = other RNA
atatacatgcttgtcaggct

SEQ ID NO: 267 - RNA, 20 nt, synthetic construct
  source 1..20: mol_type = other RNA
gactgggtctttgtttattg

SEQ ID NO: 268 - RNA, 20 nt, synthetic construct
  source 1..20: mol_type = other RNA
agggactgggtctttgttta

SEQ ID NO: 269 - RNA, 20 nt, synthetic construct
  source 1..20: mol_type = other RNA
tagggactgggtctttgttt

SEQ ID NO: 270 - RNA, 20 nt, synthetic construct
  source 1..20: mol_type = other RNA
ttagggactgggtctttgtt

SEQ ID NO: 271 - RNA, 20 nt, synthetic construct
  source 1..20: mol_type = other RNA
atttagggactgggtctttg

SEQ ID NO: 272 - RNA, 20 nt, synthetic construct
  source 1..20: mol_type = other RNA
taatttagggactgggtctt

SEQ ID NO: 273 - RNA, 20 nt, synthetic construct
  source 1..20: mol_type = other RNA
ctataatttagggactgggt

SEQ ID NO: 274 - RNA, 20 nt, synthetic construct
  source 1..20: mol_type = other RNA
tctataatttagggactggg

SEQ ID NO: 275 - RNA, 20 nt, synthetic construct
  source 1..20: mol_type = other RNA
ctgttgtgatgtcgataaac

SEQ ID NO: 276 - RNA, 20 nt, synthetic construct
  source 1..20: mol_type = other RNA
ggatctgttgtgatgtcgat

SEQ ID NO: 277 - RNA, 20 nt, synthetic construct
  source 1..20: mol_type = other RNA
gggatctgttgtgatgtcga

SEQ ID NO: 278 - RNA, 20 nt, synthetic construct
  source 1..20: mol_type = other RNA
agggatctgttgtgatgtcg

SEQ ID NO: 279 - RNA, 20 nt, synthetic construct
  source 1..20: mol_type = other RNA
tgacaagtgatactgtggta

SEQ ID NO: 280 - RNA, 20 nt, synthetic construct
  source 1..20: mol_type = other RNA
ctgacaagtgatactgtggt

SEQ ID NO: 281 - RNA, 20 nt, synthetic construct
  source 1..20: mol_type = other RNA
tctgacaagtgatactgtgg

SEQ ID NO: 282 - RNA, 20 nt, synthetic construct
  source 1..20: mol_type = other RNA
ttctgacaagtgatactgtg

SEQ ID NO: 283 - RNA, 20 nt, synthetic construct
  source 1..20: mol_type = other RNA
gggcactatatcctttaaca

SEQ ID NO: 284 - RNA, 20 nt, synthetic construct
  source 1..20: mol_type = other RNA
tgggcactatatcctttaac

SEQ ID NO: 285 - RNA, 20 nt, synthetic construct
  source 1..20: mol_type = other RNA
cttgggcactatatccttta

SEQ ID NO: 286 - RNA, 20 nt, synthetic construct
  source 1..20: mol_type = other RNA
acttgggcactatatccttt

SEQ ID NO: 287 - RNA, 20 nt, synthetic construct
  source 1..20: mol_type = other RNA
aacttgggcactatatcctt

SEQ ID NO: 288 - RNA, 20 nt, synthetic construct
  source 1..20: mol_type = other RNA
taacttgggcactatatcct

SEQ ID NO: 289 - RNA, 20 nt, synthetic construct
  source 1..20: mol_type = other RNA
ataacttgggcactatatcc

SEQ ID NO: 290 - RNA, 20 nt, synthetic construct
  source 1..20: mol_type = other RNA
ccatataacttgggcactat

SEQ ID NO: 291 - RNA, 20 nt, synthetic construct
  source 1..20: mol_type = other RNA
accatataacttgggcacta

SEQ ID NO: 292 - RNA, 20 nt, synthetic construct
  source 1..20: mol_type = other RNA
caccatataacttgggcact

SEQ ID NO: 293 - RNA, 20 nt, synthetic construct
  source 1..20: mol_type = other RNA
tcaccatataacttgggcac

SEQ ID NO: 294 - RNA, 20 nt, synthetic construct
  source 1..20: mol_type = other RNA
aggtcaccatataacttggg

SEQ ID NO: 295 - RNA, 20 nt, synthetic construct
  source 1..20: mol_type = other RNA
taggtcaccatataacttgg

SEQ ID NO: 296 - RNA, 20 nt, synthetic construct
  source 1..20: mol_type = other RNA
gtaggtcaccatataacttg

SEQ ID NO: 297 - RNA, 20 nt, synthetic construct
  source 1..20: mol_type = other RNA
ggtaggtcaccatataactt

SEQ ID NO: 298 - RNA, 20 nt, synthetic construct
  source 1..20: mol_type = other RNA
aggtaggtcaccatataact

SEQ ID NO: 299 - RNA, 20 nt, synthetic construct
  source 1..20: mol_type = other RNA
aaggtaggtcaccatataac

SEQ ID NO: 300 - RNA, 20 nt, synthetic construct
  source 1..20: mol_type = other RNA
caaaggtaggtcaccatata

SEQ ID NO: 301 - RNA, 20 nt, synthetic construct
  source 1..20: mol_type = other RNA
acaaaggtaggtcaccatat

SEQ ID NO: 302 - RNA, 20 nt, synthetic construct
  source 1..20: mol_type = other RNA
gacaaaggtaggtcaccata

SEQ ID NO: 303 - RNA, 20 nt, synthetic construct
  source 1..20: mol_type = other RNA
gcttagtctgtggtcctgaa

SEQ ID NO: 304 - RNA, 20 nt, synthetic construct
  source 1..20: mol_type = other RNA
agcttagtctgtggtcctga

SEQ ID NO: 305 - RNA, 20 nt, synthetic construct
  source 1..20: mol_type = other RNA
cagcttagtctgtggtcctg

SEQ ID NO: 306 - RNA, 20 nt, synthetic construct
  source 1..20: mol_type = other RNA
aatttcgacagcttagtctg

SEQ ID NO: 307 - RNA, 20 nt, synthetic construct
  source 1..20: mol_type = other RNA
cgttaatttcgacagcttag

SEQ ID NO: 308 - RNA, 20 nt, synthetic construct
  source 1..20: mol_type = other RNA
gcgttaatttcgacagctta

SEQ ID NO: 309 - RNA, 20 nt, synthetic construct
  source 1..20: mol_type = other RNA
agcgttaatttcgacagctt

SEQ ID NO: 310 - RNA, 20 nt, synthetic construct
  source 1..20: mol_type = other RNA
cagcgttaatttcgacagct

SEQ ID NO: 311 - RNA, 20 nt, synthetic construct
  source 1..20: mol_type = other RNA
tcagcgttaatttcgacagc

SEQ ID NO: 312 - RNA, 20 nt, synthetic construct
  source 1..20: mol_type = other RNA
atcagcgttaatttcgacag

SEQ ID NO: 313 - RNA, 20 nt, synthetic construct
  source 1..20: mol_type = other RNA
ttggtattctggccctaaaa

SEQ ID NO: 314 - RNA, 20 nt, synthetic construct
  source 1..20: mol_type = other RNA
tttggtattctggccctaaa

SEQ ID NO: 315 - RNA, 20 nt, synthetic construct
  source 1..20: mol_type = other RNA
ttttggtattctggccctaa

SEQ ID NO: 316 - RNA, 20 nt, synthetic construct
  source 1..20: mol_type = other RNA
attttggtattctggcccta

SEQ ID NO: 317 - RNA, 20 nt, synthetic construct
  source 1..20: mol_type = other RNA
cattttggtattctggccct

SEQ ID NO: 318 - RNA, 20 nt, synthetic construct
  source 1..20: mol_type = other RNA
ccattttggtattctggccc

SEQ ID NO: 319 - RNA, 20 nt, synthetic construct
  source 1..20: mol_type = other RNA
gagccattttggtattctgg

SEQ ID NO: 320 - RNA, 20 nt, synthetic construct
  source 1..20: mol_type = other RNA
ggagccattttggtattctg

SEQ ID NO: 321 - RNA, 20 nt, synthetic construct
  source 1..20: mol_type = other RNA
aggagccattttggtattct

SEQ ID NO: 322 - RNA, 20 nt, synthetic construct
  source 1..20: mol_type = other RNA
gaggagccattttggtattc

SEQ ID NO: 323 - RNA, 20 nt, synthetic construct
  source 1..20: mol_type = other RNA
agagaggagccattttggta

SEQ ID NO: 324 - RNA, 20 nt, synthetic construct
  source 1..20: mol_type = other RNA
caaatagaggaagcaactca

SEQ ID NO: 325 - RNA, 20 nt, synthetic construct
  source 1..20: mol_type = other RNA
aaccaaatagaggaagcaac

SEQ ID NO: 326 - RNA, 19 nt, synthetic construct
  source 1..19: mol_type = other RNA
cagttccacgttgcttgaa

SEQ ID NO: 327 - RNA, 19 nt, synthetic construct
  source 1..19: mol_type = other RNA
ttcaagcaacgtggaactg

SEQ ID NO: 328 - RNA, 19 nt, synthetic construct
  source 1..19: mol_type = other RNA
ttgttcctctagttatttc

SEQ ID NO: 329 - RNA, 19 nt, synthetic construct
  source 1..19: mol_type = other RNA
gaaataactagaggaacaa

SEQ ID NO: 330 - RNA, 19 nt, synthetic construct
  source 1..19: mol_type = other RNA
tgttcctctagttatttcc

SEQ ID NO: 331 - RNA, 19 nt, synthetic construct
  source 1..19: mol_type = other RNA
ggaaataactagaggaaca

SEQ ID NO: 332 - RNA, 19 nt, synthetic construct
  source 1..19: mol_type = other RNA
ctagttatttcctccagaa

SEQ ID NO: 333 - RNA, 19 nt, synthetic construct
  source 1..19: mol_type = other RNA
ttctggaggaaataactag

SEQ ID NO: 334 - RNA, 19 nt, synthetic construct
  source 1..19: mol_type = other RNA
tagttatttcctccagaat

SEQ ID NO: 335 - RNA, 19 nt, synthetic construct
  source 1..19: mol_type = other RNA
attctggaggaaataacta

SEQ ID NO: 336 - RNA, 19 nt, synthetic construct
  source 1..19: mol_type = other RNA
agttatttcctccagaatt

SEQ ID NO: 337 - RNA, 19 nt, synthetic construct
  source 1..19: mol_type = other RNA
aattctggaggaaataact

SEQ ID NO: 338 - RNA, 19 nt, synthetic construct
  source 1..19: mol_type = other RNA
gttatttcctccagaattg

SEQ ID NO: 339 - RNA, 19 nt, synthetic construct
  source 1..19: mol_type = other RNA
caattctggaggaaataac

SEQ ID NO: 340 - RNA, 19 nt, synthetic construct
  source 1..19: mol_type = other RNA
ttatttcctccagaattga

SEQ ID NO: 341 - RNA, 19 nt, synthetic construct
  source 1..19: mol_type = other RNA
tcaattctggaggaaataa

SEQ ID NO: 342 - RNA, 19 nt, synthetic construct
  source 1..19: mol_type = other RNA
atttcctccagaattgatc

SEQ ID NO: 343 - RNA, 19 nt, synthetic construct
  source 1..19: mol_type = other RNA
gatcaattctggaggaaat

SEQ ID NO: 344 - RNA, 19 nt, synthetic construct
  source 1..19: mol_type = other RNA
ttcctccagaattgatcaa

SEQ ID NO: 345 - RNA, 19 nt, synthetic construct
  source 1..19: mol_type = other RNA
ttgatcaattctggaggaa

SEQ ID NO: 346 - RNA, 19 nt, synthetic construct
  source 1..19: mol_type = other RNA
tcctccagaattgatcaag

SEQ ID NO: 347 - RNA, 19 nt, synthetic construct
  source 1..19: mol_type = other RNA
cttgatcaattctggagga

SEQ ID NO: 348 - RNA, 19 nt, synthetic construct
  source 1..19: mol_type = other RNA
cctccagaattgatcaaga

SEQ ID NO: 349 - RNA, 19 nt, synthetic construct
  source 1..19: mol_type = other RNA
tcttgatcaattctggagg

SEQ ID NO: 350 - RNA, 19 nt, synthetic construct
  source 1..19: mol_type = other RNA
catcatttgattctctatc

SEQ ID NO: 351 - RNA, 19 nt, synthetic construct
  source 1..19: mol_type = other RNA
gatagagaatcaaatgatg

SEQ ID NO: 352 - RNA, 19 nt, synthetic construct
  source 1..19: mol_type = other RNA
tcatttgattctctatctc

SEQ ID NO: 353 - RNA, 19 nt, synthetic construct
  source 1..19: mol_type = other RNA
gagatagagaatcaaatga

SEQ ID NO: 354 - RNA, 19 nt, synthetic construct
  source 1..19: mol_type = other RNA
catttgattctctatctcc

SEQ ID NO: 355 - RNA, 19 nt, synthetic construct
  source 1..19: mol_type = other RNA
ggagatagagaatcaaatg

SEQ ID NO: 356 - RNA, 19 nt, synthetic construct
  source 1..19: mol_type = other RNA
atttgattctctatctcca

SEQ ID NO: 357 - RNA, 19 nt, synthetic construct
  source 1..19: mol_type = other RNA
tggagatagagaatcaaat

SEQ ID NO: 358 - RNA, 19 nt, synthetic construct
  source 1..19: mol_type = other RNA
tttgattctctatctccag

SEQ ID NO: 359 - RNA, 19 nt, synthetic construct
  source 1..19: mol_type = other RNA
ctggagatagagaatcaaa

SEQ ID NO: 360 - RNA, 19 nt, synthetic construct
  source 1..19: mol_type = other RNA
ttgattctctatctccaga

SEQ ID NO: 361 - RNA, 19 nt, synthetic construct
  source 1..19: mol_type = other RNA
tctggagatagagaatcaa

SEQ ID NO: 362 - RNA, 19 nt, synthetic construct
  source 1..19: mol_type = other RNA
ctatctccagagccaaaat

SEQ ID NO: 363 - RNA, 19 nt, synthetic construct
  source 1..19: mol_type = other RNA
attttggctctggagatag

SEQ ID NO: 364 - RNA, 19 nt, synthetic construct
  source 1..19: mol_type = other RNA
tatctccagagccaaaatc

SEQ ID NO: 365 - RNA, 19 nt, synthetic construct
  source 1..19: mol_type = other RNA
gattttggctctggagata

SEQ ID NO: 366 - RNA, 19 nt, synthetic construct
  source 1..19: mol_type = other RNA
atctccagagccaaaatca

SEQ ID NO: 367 - RNA, 19 nt, synthetic construct
  source 1..19: mol_type = other RNA
tgattttggctctggagat

SEQ ID NO: 368 - RNA, 19 nt, synthetic construct
  source 1..19: mol_type = other RNA
tccagagccaaaatcaaga

SEQ ID NO: 369 - RNA, 19 nt, synthetic construct
  source 1..19: mol_type = other RNA
tcttgattttggctctgga

SEQ ID NO: 370 - RNA, 19 nt, synthetic construct
  source 1..19: mol_type = other RNA
ccagagccaaaatcaagat

SEQ ID NO: 371 - RNA, 19 nt, synthetic construct
  source 1..19: mol_type = other RNA
atcttgattttggctctgg

SEQ ID NO: 372 - RNA, 19 nt, synthetic construct
  source 1..19: mol_type = other RNA
cagagccaaaatcaagatt

SEQ ID NO: 373 - RNA, 19 nt, synthetic construct
  source 1..19: mol_type = other RNA
aatcttgattttggctctg

SEQ ID NO: 374 - RNA, 19 nt, synthetic construct
  source 1..19: mol_type = other RNA
caagatttgctatgttaga

SEQ ID NO: 375 - RNA, 19 nt, synthetic construct
  source 1..19: mol_type = other RNA
tctaacatagcaaatcttg

SEQ ID NO: 376 - RNA, 19 nt, synthetic construct
  source 1..19: mol_type = other RNA
aagatttgctatgttagac

SEQ ID NO: 377 - RNA, 19 nt, synthetic construct
  source 1..19: mol_type = other RNA
gtctaacatagcaaatctt

SEQ ID NO: 378 - RNA, 19 nt, synthetic construct
  source 1..19: mol_type = other RNA
agatttgctatgttagacg

SEQ ID NO: 379 - RNA, 19 nt, synthetic construct
  source 1..19: mol_type = other RNA
cgtctaacatagcaaatct

SEQ ID NO: 380 - RNA, 19 nt, synthetic construct
  source 1..19: mol_type = other RNA
gatttgctatgttagacga

SEQ ID NO: 381 - RNA, 19 nt, synthetic construct
  source 1..19: mol_type = other RNA
tcgtctaacatagcaaatc

SEQ ID NO: 382 - RNA, 19 nt, synthetic construct
  source 1..19: mol_type = other RNA
atttgctatgttagacgat

SEQ ID NO: 383 - RNA, 19 nt, synthetic construct
  source 1..19: mol_type = other RNA
atcgtctaacatagcaaat

SEQ ID NO: 384 - RNA, 19 nt, synthetic construct
  source 1..19: mol_type = other RNA
tttgctatgttagacgatg

SEQ ID NO: 385 - RNA, 19 nt, synthetic construct
  source 1..19: mol_type = other RNA
catcgtctaacatagcaaa

SEQ ID NO: 386 - RNA, 19 nt, synthetic construct
  source 1..19: mol_type = other RNA
ttgctatgttagacgatgt

SEQ ID NO: 387 - RNA, 19 nt, synthetic construct
  source 1..19: mol_type = other RNA
acatcgtctaacatagcaa

SEQ ID NO: 388 - RNA, 19 nt, synthetic construct
  source 1..19: mol_type = other RNA
tgctatgttagacgatgta

SEQ ID NO: 389 - RNA, 19 nt, synthetic construct
  source 1..19: mol_type = other RNA
tacatcgtctaacatagca

SEQ ID NO: 390 - RNA, 19 nt, synthetic construct
  source 1..19: mol_type = other RNA
gctatgttagacgatgtaa

SEQ ID NO: 391 - RNA, 19 nt, synthetic construct
  source 1..19: mol_type = other RNA
ttacatcgtctaacatagc

SEQ ID NO: 392 - RNA, 19 nt, synthetic construct
  source 1..19: mol_type = other RNA
ctatgttagacgatgtaaa

SEQ ID NO: 393 - RNA, 19 nt, synthetic construct
  source 1..19: mol_type = other RNA
tttacatcgtctaacatag

SEQ ID NO: 394 - RNA, 19 nt, synthetic construct
  source 1..19: mol_type = other RNA
aaaattttagccaatggcc

SEQ ID NO: 395 - RNA, 19 nt, synthetic construct
  source 1..19: mol_type = other RNA
ggccattggctaaaatttt

SEQ ID NO: 396 - RNA, 19 nt, synthetic construct
  source 1..19: mol_type = other RNA
aaattttagccaatggcct

SEQ ID NO: 397 - RNA, 19 nt, synthetic construct
  source 1..19: mol_type = other RNA
aggccattggctaaaattt

SEQ ID NO: 398 - RNA, 19 nt, synthetic construct
  source 1..19: mol_type = other RNA
attttagccaatggcctcc

SEQ ID NO: 399 - RNA, 19 nt, synthetic construct
  source 1..19: mol_type = other RNA
ggaggccattggctaaaat

SEQ ID NO: 400 - RNA, 19 nt, synthetic construct
  source 1..19: mol_type = other RNA
tagccaatggcctccttca

SEQ ID NO: 401 - RNA, 19 nt, synthetic construct
  source 1..19: mol_type = other RNA
tgaaggaggccattggcta

SEQ ID NO: 402 - RNA, 19 nt, synthetic construct
  source 1..19: mol_type = other RNA
agccaatggcctccttcag

SEQ ID NO: 403 - RNA, 19 nt, synthetic construct
  source 1..19: mol_type = other RNA
ctgaaggaggccattggct

SEQ ID NO: 404 - RNA, 19 nt, synthetic construct
  source 1..19: mol_type = other RNA
gccaatggcctccttcagt

SEQ ID NO: 405 - RNA, 19 nt, synthetic construct
  source 1..19: mol_type = other RNA
actgaaggaggccattggc

SEQ ID NO: 406 - RNA, 19 nt, synthetic construct
  source 1..19: mol_type = other RNA
caatggcctccttcagttg

SEQ ID NO: 407 - RNA, 19 nt, synthetic construct
  source 1..19: mol_type = other RNA
caactgaaggaggccattg

SEQ ID NO: 408 - RNA, 19 nt, synthetic construct
  source 1..19: mol_type = other RNA
aatggcctccttcagttgg

SEQ ID NO: 409 - RNA, 19 nt, synthetic construct
  source 1..19: mol_type = other RNA
ccaactgaaggaggccatt

SEQ ID NO: 410 - RNA, 19 nt, synthetic construct
  source 1..19: mol_type = other RNA
tggcctccttcagttggga

SEQ ID NO: 411 - RNA, 19 nt, synthetic construct
  source 1..19: mol_type = other RNA
tcccaactgaaggaggcca

SEQ ID NO: 412 - RNA, 19 nt, synthetic construct
  source 1..19: mol_type = other RNA
ggcctccttcagttgggac

SEQ ID NO: 413 - RNA, 19 nt, synthetic construct
  source 1..19: mol_type = other RNA
gtcccaactgaaggaggcc

SEQ ID NO: 414 - RNA, 19 nt, synthetic construct
  source 1..19: mol_type = other RNA
gcctccttcagttgggaca

SEQ ID NO: 415 - RNA, 19 nt, synthetic construct
  source 1..19: mol_type = other RNA
tgtcccaactgaaggaggc

SEQ ID NO: 416 - RNA, 19 nt, synthetic construct
  source 1..19: mol_type = other RNA
cctccttcagttgggacat

SEQ ID NO: 417 - RNA, 19 nt, synthetic construct
  source 1..19: mol_type = other RNA
atgtcccaactgaaggagg

SEQ ID NO: 418 - RNA, 19 nt, synthetic construct
  source 1..19: mol_type = other RNA
ctccttcagttgggacatg

SEQ ID NO: 419 - RNA, 19 nt, synthetic construct
  source 1..19: mol_type = other RNA
catgtcccaactgaaggag

SEQ ID NO: 420 - RNA, 19 nt, synthetic construct
  source 1..19: mol_type = other RNA
cttcagttgggacatggtc

SEQ ID NO: 421 - RNA, 19 nt, synthetic construct
  source 1..19: mol_type = other RNA
gaccatgtcccaactgaag

SEQ ID NO: 422 - RNA, 19 nt, synthetic construct
  source 1..19: mol_type = other RNA
ttcagttgggacatggtct

SEQ ID NO: 423 - RNA, 19 nt, synthetic construct
  source 1..19: mol_type = other RNA
agaccatgtcccaactgaa

SEQ ID NO: 424 - RNA, 19 nt, synthetic construct
  source 1..19: mol_type = other RNA
tcagttgggacatggtctt

SEQ ID NO: 425 - RNA, 19 nt, synthetic construct
  source 1..19: mol_type = other RNA
aagaccatgtcccaactga

SEQ ID NO: 426 - RNA, 19 nt, synthetic construct
  source 1..19: mol_type = other RNA
ttgggacatggtcttaaag

SEQ ID NO: 427 - RNA, 19 nt, synthetic construct
  source 1..19: mol_type = other RNA
ctttaagaccatgtcccaa

SEQ ID NO: 428 - RNA, 19 nt, synthetic construct
  source 1..19: mol_type = other RNA
tgggacatggtcttaaaga

SEQ ID NO: 429 - RNA, 19 nt, synthetic construct
  source 1..19: mol_type = other RNA
tctttaagaccatgtccca

SEQ ID NO: 430 - RNA, 19 nt, synthetic construct
  source 1..19: mol_type = other RNA
tcttaaagactttgtccat

SEQ ID NO: 431 - RNA, 19 nt, synthetic construct
  source 1..19: mol_type = other RNA
atggacaaagtctttaaga

SEQ ID NO: 432 - RNA, 19 nt, synthetic construct
  source 1..19: mol_type = other RNA
cttaaagactttgtccata

SEQ ID NO: 433 - RNA, 19 nt, synthetic construct
  source 1..19: mol_type = other RNA
tatggacaaagtctttaag

SEQ ID NO: 434 - RNA, 19 nt, synthetic construct
  source 1..19: mol_type = other RNA
taaagactttgtccataag

SEQ ID NO: 435 - RNA, 19 nt, synthetic construct
  source 1..19: mol_type = other RNA
cttatggacaaagtcttta

SEQ ID NO: 436 - RNA, 19 nt, synthetic construct
  source 1..19: mol_type = other RNA
aaagactttgtccataaga

SEQ ID NO: 437 - RNA, 19 nt, synthetic construct
  source 1..19: mol_type = other RNA
tcttatggacaaagtcttt

SEQ ID NO: 438 - RNA, 19 nt, synthetic construct
  source 1..19: mol_type = other RNA
actttgtccataagacgaa

SEQ ID NO: 439 - RNA, 19 nt, synthetic construct
  source 1..19: mol_type = other RNA
ttcgtcttatggacaaagt

SEQ ID NO: 440 - RNA, 19 nt, synthetic construct
  source 1..19: mol_type = other RNA
ctttgtccataagacgaag

SEQ ID NO: 441 - RNA, 19 nt, synthetic construct
  source 1..19: mol_type = other RNA
cttcgtcttatggacaaag

SEQ ID NO: 442 - RNA, 19 nt, synthetic construct
  source 1..19: mol_type = other RNA
tttgtccataagacgaagg

SEQ ID NO: 443 - RNA, 19 nt, synthetic construct
  source 1..19: mol_type = other RNA
ccttcgtcttatggacaaa

SEQ ID NO: 444 - RNA, 19 nt, synthetic construct
  source 1..19: mol_type = other RNA
ttgtccataagacgaaggg

SEQ ID NO: 445 - RNA, 19 nt, synthetic construct
  source 1..19: mol_type = other RNA
cccttcgtcttatggacaa

SEQ ID NO: 446 - RNA, 19 nt, synthetic construct
  source 1..19: mol_type = other RNA
tgtccataagacgaagggc

SEQ ID NO: 447 - RNA, 19 nt, synthetic construct
  source 1..19: mol_type = other RNA
gcccttcgtcttatggaca

SEQ ID NO: 448 - RNA, 19 nt, synthetic construct
  source 1..19: mol_type = other RNA
gtccataagacgaagggcc

SEQ ID NO: 449 - RNA, 19 nt, synthetic construct
  source 1..19: mol_type = other RNA
ggcccttcgtcttatggac

SEQ ID NO: 450 - RNA, 19 nt, synthetic construct
  source 1..19: mol_type = other RNA
ataagacgaagggccaaat

SEQ ID NO: 451 - RNA, 19 nt, synthetic construct
  source 1..19: mol_type = other RNA
atttggcccttcgtcttat

SEQ ID NO: 452 - RNA, 19 nt, synthetic construct
  source 1..19: mol_type = other RNA
taagacgaagggccaaatt

SEQ ID NO: 453 - RNA, 19 nt, synthetic construct
  source 1..19: mol_type = other RNA
aatttggcccttcgtctta

SEQ ID NO: 454 - RNA, 19 nt, synthetic construct
  source 1..19: mol_type = other RNA
aagacgaagggccaaatta

SEQ ID NO: 455 - RNA, 19 nt, synthetic construct
  source 1..19: mol_type = other RNA
taatttggcccttcgtctt

SEQ ID NO: 456 - RNA, 19 nt, synthetic construct
  source 1..19: mol_type = other RNA
agacgaagggccaaattaa

SEQ ID NO: 457 - RNA, 19 nt, synthetic construct
  source 1..19: mol_type = other RNA
ttaatttggcccttcgtct

SEQ ID NO: 458 - RNA, 19 nt, synthetic construct
  source 1..19: mol_type = other RNA
gacgaagggccaaattaat

SEQ ID NO: 459 - RNA, 19 nt, synthetic construct
  source 1..19: mol_type = other RNA
attaatttggcccttcgtc

SEQ ID NO: 460 - RNA, 19 nt, synthetic construct
  source 1..19: mol_type = other RNA
acgaagggccaaattaatg

SEQ ID NO: 461 - RNA, 19 nt, synthetic construct
  source 1..19: mol_type = other RNA
cattaatttggcccttcgt

SEQ ID NO: 462 - RNA, 19 nt, synthetic construct
  source 1..19: mol_type = other RNA
cgaagggccaaattaatga

SEQ ID NO: 463 - RNA, 19 nt, synthetic construct
  source 1..19: mol_type = other RNA
tcattaatttggcccttcg

SEQ ID NO: 464 - RNA, 19 nt, synthetic construct
  source 1..19: mol_type = other RNA
gaagggccaaattaatgac

SEQ ID NO: 465 - RNA, 19 nt, synthetic construct
  source 1..19: mol_type = other RNA
gtcattaatttggcccttc

SEQ ID NO: 466 - RNA, 19 nt, synthetic construct
  source 1..19: mol_type = other RNA
gggccaaattaatgacata

SEQ ID NO: 467 - RNA, 19 nt, synthetic construct
  source 1..19: mol_type = other RNA
tatgtcattaatttggccc

SEQ ID NO: 468 - RNA, 19 nt, synthetic construct
  source 1..19: mol_type = other RNA
ggccaaattaatgacatat

SEQ ID NO: 469 - RNA, 19 nt, synthetic construct
  source 1..19: mol_type = other RNA
atatgtcattaatttggcc

SEQ ID NO: 470 - RNA, 19 nt, synthetic construct
  source 1..19: mol_type = other RNA
ttttatgatctatcgctgc

SEQ ID NO: 471 - RNA, 19 nt, synthetic construct
  source 1..19: mol_type = other RNA
gcagcgatagatcataaaa

SEQ ID NO: 472 - RNA, 19 nt, synthetic construct
  source 1..19: mol_type = other RNA
ttatgatctatcgctgcaa

SEQ ID NO: 473 - RNA, 19 nt, synthetic construct
  source 1..19: mol_type = other RNA
ttgcagcgatagatcataa

SEQ ID NO: 474 - RNA, 19 nt, synthetic construct
  source 1..19: mol_type = other RNA
tatgatctatcgctgcaaa

SEQ ID NO: 475 - RNA, 19 nt, synthetic construct
  source 1..19: mol_type = other RNA
tttgcagcgatagatcata

SEQ ID NO: 476 - RNA, 19 nt, synthetic construct
  source 1..19: mol_type = other RNA
gaagaggtaaagaatatgt

SEQ ID NO: 477 - RNA, 19 nt, synthetic construct
  source 1..19: mol_type = other RNA
acatattctttacctcttc

SEQ ID NO: 478 - RNA, 19 nt, synthetic construct
  source 1..19: mol_type = other RNA
aagaggtaaagaatatgtc

SEQ ID NO: 479 - RNA, 19 nt, synthetic construct
  source 1..19: mol_type = other RNA
gacatattctttacctctt

SEQ ID NO: 480 - RNA, 19 nt, synthetic construct
  source 1..19: mol_type = other RNA
gaagagcaactaactaact

SEQ ID NO: 481 - RNA, 19 nt, synthetic construct
  source 1..19: mol_type = other RNA
agttagttagttgctcttc

SEQ ID NO: 482 - RNA, 19 nt, synthetic construct
  source 1..19: mol_type = other RNA
aagagcaactaactaactt

SEQ ID NO: 483 - RNA, 19 nt, synthetic construct
  source 1..19: mol_type = other RNA
aagttagttagttgctctt

SEQ ID NO: 484 - RNA, 19 nt, synthetic construct
  source 1..19: mol_type = other RNA
agagcaactaactaactta

SEQ ID NO: 485 - RNA, 19 nt, synthetic construct
  source 1..19: mol_type = other RNA
taagttagttagttgctct

SEQ ID NO: 486 - RNA, 19 nt, synthetic construct
  source 1..19: mol_type = other RNA
gagcaactaactaacttaa

SEQ ID NO: 487 - RNA, 19 nt, synthetic construct
  source 1..19: mol_type = other RNA
ttaagttagttagttgctc

SEQ ID NO: 488 - RNA, 19 nt, synthetic construct
  source 1..19: mol_type = other RNA
caagataatagcatcaaag

SEQ ID NO: 489 - RNA, 19 nt, synthetic construct
  source 1..19: mol_type = other RNA
ctttgatgctattatcttg

SEQ ID NO: 490 - RNA, 19 nt, synthetic construct
  source 1..19: mol_type = other RNA
agataatagcatcaaagac

SEQ ID NO: 491 - RNA, 19 nt, synthetic construct
  source 1..19: mol_type = other RNA
gtctttgatgctattatct

SEQ ID NO: 492 - RNA, 19 nt, synthetic construct
  source 1..19: mol_type = other RNA
gataatagcatcaaagacc

SEQ ID NO: 493 - RNA, 19 nt, synthetic construct
  source 1..19: mol_type = other RNA
ggtctttgatgctattatc

SEQ ID NO: 494 - RNA, 19 nt, synthetic construct
  source 1..19: mol_type = other RNA
ataatagcatcaaagacct

SEQ ID NO: 495 - RNA, 19 nt, synthetic construct
  source 1..19: mol_type = other RNA
aggtctttgatgctattat

SEQ ID NO: 496 - RNA, 19 nt, synthetic construct
  source 1..19: mol_type = other RNA
taatagcatcaaagacctt

SEQ ID NO: 497 - RNA, 19 nt, synthetic construct
  source 1..19: mol_type = other RNA
aaggtctttgatgctatta

SEQ ID NO: 498 - RNA, 19 nt, synthetic construct
  source 1..19: mol_type = other RNA
agcatcaaagaccttctcc

SEQ ID NO: 499 - RNA, 19 nt, synthetic construct
  source 1..19: mol_type = other RNA
ggagaaggtctttgatgct

SEQ ID NO: 500 - RNA, 19 nt, synthetic construct
  source 1..19: mol_type = other RNA
gcatcaaagaccttctcca

SEQ ID NO: 501 - RNA, 19 nt, synthetic construct
  source 1..19: mol_type = other RNA
tggagaaggtctttgatgc

SEQ ID NO: 502 - RNA, 19 nt, synthetic construct
  source 1..19: mol_type = other RNA
catcaaagaccttctccag

SEQ ID NO: 503 - RNA, 19 nt, synthetic construct
  source 1..19: mol_type = other RNA
ctggagaaggtctttgatg

SEQ ID NO: 504 - RNA, 19 nt, synthetic construct
  source 1..19: mol_type = other RNA
atcaaagaccttctccaga

SEQ ID NO: 505 - RNA, 19 nt, synthetic construct
  source 1..19: mol_type = other RNA
tctggagaaggtctttgat

SEQ ID NO: 506 - RNA, 19 nt, synthetic construct
  source 1..19: mol_type = other RNA
tcaaagaccttctccagac

SEQ ID NO: 507 - RNA, 19 nt, synthetic construct
  source 1..19: mol_type = other RNA
gtctggagaaggtctttga

SEQ ID NO: 508 - RNA, 19 nt, synthetic construct
  source 1..19: mol_type = other RNA
caaagaccttctccagacc

SEQ ID NO: 509 - RNA, 19 nt, synthetic construct
  source 1..19: mol_type = other RNA
ggtctggagaaggtctttg

SEQ ID NO: 510 - RNA, 19 nt, synthetic construct
  source 1..19: mol_type = other RNA
aaagaccttctccagaccg

SEQ ID NO: 511 - RNA, 19 nt, synthetic construct
  source 1..19: mol_type = other RNA
cggtctggagaaggtcttt

SEQ ID NO: 512 - RNA, 19 nt, synthetic construct
  source 1..19: mol_type = other RNA
aagaccttctccagaccgt

SEQ ID NO: 513 - RNA, 19 nt, synthetic construct
  source 1..19: mol_type = other RNA
acggtctggagaaggtctt

SEQ ID NO: 514 - RNA, 19 nt, synthetic construct
  source 1..19: mol_type = other RNA
agaccttctccagaccgtg

SEQ ID NO: 515 - RNA, 19 nt, synthetic construct
  source 1..19: mol_type = other RNA
cacggtctggagaaggtct

SEQ ID NO: 516 - RNA, 19 nt, synthetic construct
  source 1..19: mol_type = other RNA
gaccttctccagaccgtgg

SEQ ID NO: 517 - RNA, 19 nt, synthetic construct
  source 1..19: mol_type = other RNA
ccacggtctggagaaggtc

SEQ ID NO: 518 - RNA, 19 nt, synthetic construct
  source 1..19: mol_type = other RNA
gaccgtggaagaccaatat

SEQ ID NO: 519 - RNA, 19 nt, synthetic construct
  source 1..19: mol_type = other RNA
atattggtcttccacggtc

SEQ ID NO: 520 - RNA, 19 nt, synthetic construct
  source 1..19: mol_type = other RNA
ccgtggaagaccaatataa

SEQ ID NO: 521 - RNA, 19 nt, synthetic construct
  source 1..19: mol_type = other RNA
ttatattggtcttccacgg

SEQ ID NO: 522 - RNA, 19 nt, synthetic construct
  source 1..19: mol_type = other RNA
cgtggaagaccaatataaa

SEQ ID NO: 523 - RNA, 19 nt, synthetic construct
  source 1..19: mol_type = other RNA
tttatattggtcttccacg

SEQ ID NO: 524 - RNA, 19 nt, synthetic construct
  source 1..19: mol_type = other RNA
cagcatagtcaaataaaag

SEQ ID NO: 525 - RNA, 19 nt, synthetic construct
  source 1..19: mol_type = other RNA
cttttatttgactatgctg

SEQ ID NO: 526 - RNA, 19 nt, synthetic construct
  source 1..19: mol_type = other RNA
aaatcagctcagaaggact

SEQ ID NO: 527 - RNA, 19 nt, synthetic construct
  source 1..19: mol_type = other RNA
agtccttctgagctgattt

SEQ ID NO: 528 - RNA, 19 nt, synthetic construct
  source 1..19: mol_type = other RNA
aatcagctcagaaggacta

SEQ ID NO: 529 - RNA, 19 nt, synthetic construct
  source 1..19: mol_type = other RNA
tagtccttctgagctgatt

SEQ ID NO: 530 - RNA, 19 nt, synthetic construct
  source 1..19: mol_type = other RNA
atcagctcagaaggactag

SEQ ID NO: 531 - RNA, 19 nt, synthetic construct
  source 1..19: mol_type = other RNA
ctagtccttctgagctgat

SEQ ID NO: 532 - RNA, 19 nt, synthetic construct
  source 1..19: mol_type = other RNA
tcagctcagaaggactagt

SEQ ID NO: 533 - RNA, 19 nt, synthetic construct
  source 1..19: mol_type = other RNA
actagtccttctgagctga

SEQ ID NO: 534 - RNA, 19 nt, synthetic construct
  source 1..19: mol_type = other RNA
agctcagaaggactagtat

SEQ ID NO: 535 - RNA, 19 nt, synthetic construct
  source 1..19: mol_type = other RNA
atactagtccttctgagct

SEQ ID NO: 536 - RNA, 19 nt, synthetic construct
  source 1..19: mol_type = other RNA
cagaaggactagtattcaa

SEQ ID NO: 537 - RNA, 19 nt, synthetic construct
  source 1..19: mol_type = other RNA
ttgaatactagtccttctg

SEQ ID NO: 538 - RNA, 19 nt, synthetic construct
  source 1..19: mol_type = other RNA
agaaggactagtattcaag

SEQ ID NO: 539 - RNA, 19 nt, synthetic construct
  source 1..19: mol_type = other RNA
cttgaatactagtccttct

SEQ ID NO: 540 - RNA, 19 nt, synthetic construct
  source 1..19: mol_type = other RNA
gaaggactagtattcaaga

SEQ ID NO: 541 - RNA, 19 nt, synthetic construct
  source 1..19: mol_type = other RNA
tcttgaatactagtccttc

SEQ ID NO: 542 - RNA, 19 nt, synthetic construct
  source 1..19: mol_type = other RNA
aaggactagtattcaagaa

SEQ ID NO: 543 - RNA, 19 nt, synthetic construct
  source 1..19: mol_type = other RNA
ttcttgaatactagtcctt

SEQ ID NO: 544 - RNA, 19 nt, synthetic construct
  source 1..19: mol_type = other RNA
aatttctctatcttccaag

SEQ ID NO: 545 - RNA, 19 nt, synthetic construct
  source 1..19: mol_type = other RNA
cttggaagatagagaaatt

SEQ ID NO: 546 - RNA, 19 nt, synthetic construct
  source 1..19: mol_type = other RNA
atttctctatcttccaagc

SEQ ID NO: 547 - RNA, 19 nt, synthetic construct
  source 1..19: mol_type = other RNA
gcttggaagatagagaaat

SEQ ID NO: 548 - RNA, 19 nt, synthetic construct
  source 1..19: mol_type = other RNA
tttctctatcttccaagcc

SEQ ID NO: 549 - RNA, 19 nt, synthetic construct
  source 1..19: mol_type = other RNA
ggcttggaagatagagaaa

SEQ ID NO: 550 - RNA, 19 nt, synthetic construct
  source 1..19: mol_type = other RNA
ttctctatcttccaagcca

SEQ ID NO: 551 - RNA, 19 nt, synthetic construct
  source 1..19: mol_type = other RNA
tggcttggaagatagagaa

SEQ ID NO: 552 - RNA, 19 nt, synthetic construct
  source 1..19: mol_type = other RNA
tctctatcttccaagccaa

SEQ ID NO: 553 - RNA, 19 nt, synthetic construct
  source 1..19: mol_type = other RNA
ttggcttggaagatagaga

SEQ ID NO: 554 - RNA, 19 nt, synthetic construct
  source 1..19: mol_type = other RNA
ctctatcttccaagccaag

SEQ ID NO: 555 - RNA, 19 nt, synthetic construct
  source 1..19: mol_type = other RNA
cttggcttggaagatagag

SEQ ID NO: 556 - RNA, 19 nt, synthetic construct
  source 1..19: mol_type = other RNA
ccaagccaagagcaccaag

SEQ ID NO: 557 - RNA, 19 nt, synthetic construct
  source 1..19: mol_type = other RNA
cttggtgctcttggcttgg

SEQ ID NO: 558 - RNA, 19 nt, synthetic construct
  source 1..19: mol_type = other RNA
caagccaagagcaccaaga

SEQ ID NO: 559 - RNA, 19 nt, synthetic construct
  source 1..19: mol_type = other RNA
tcttggtgctcttggcttg

SEQ ID NO: 560 - RNA, 19 nt, synthetic construct
  source 1..19: mol_type = other RNA
aagccaagagcaccaagaa

SEQ ID NO: 561 - RNA, 19 nt, synthetic construct
  source 1..19: mol_type = other RNA
ttcttggtgctcttggctt

SEQ ID NO: 562 - RNA, 19 nt, synthetic construct
  source 1..19: mol_type = other RNA
ctactccctttcttcagtt

SEQ ID NO: 563 - RNA, 19 nt, synthetic construct
  source 1..19: mol_type = other RNA
aactgaagaaagggagtag

SEQ ID NO: 564 - RNA, 19 nt, synthetic construct
  source 1..19: mol_type = other RNA
tactccctttcttcagttg

SEQ ID NO: 565 - RNA, 19 nt, synthetic construct
  source 1..19: mol_type = other RNA
caactgaagaaagggagta

SEQ ID NO: 566 - RNA, 19 nt, synthetic construct
  source 1..19: mol_type = other RNA
actccctttcttcagttga

SEQ ID NO: 567 - RNA, 19 nt, synthetic construct
  source 1..19: mol_type = other RNA
tcaactgaagaaagggagt

SEQ ID NO: 568 - RNA, 19 nt, synthetic construct
  source 1..19: mol_type = other RNA
ctccctttcttcagttgaa

SEQ ID NO: 569 - RNA, 19 nt, synthetic construct
  source 1..19: mol_type = other RNA
ttcaactgaagaaagggag

SEQ ID NO: 570 - RNA, 19 nt, synthetic construct
  source 1..19: mol_type = other RNA
tccctttcttcagttgaat

SEQ ID NO: 571 - RNA, 19 nt, synthetic construct
  source 1..19: mol_type = other RNA
attcaactgaagaaaggga

SEQ ID NO: 572 - RNA, 19 nt, synthetic construct
  source 1..19: mol_type = other RNA
ccctttcttcagttgaatg

SEQ ID NO: 573 - RNA, 19 nt, synthetic construct
  source 1..19: mol_type = other RNA
cattcaactgaagaaaggg

SEQ ID NO: 574 - RNA, 19 nt, synthetic construct
  source 1..19: mol_type = other RNA
gtatgccatcagacccagc

SEQ ID NO: 575 - RNA, 19 nt, synthetic construct
  source 1..19: mol_type = other RNA
gctgggtctgatggcatac

SEQ ID NO: 576 - RNA, 19 nt, synthetic construct
  source 1..19: mol_type = other RNA
tatgccatcagacccagca

SEQ ID NO: 577 - RNA, 19 nt, synthetic construct
  source 1..19: mol_type = other RNA
tgctgggtctgatggcata

SEQ ID NO: 578 - RNA, 19 nt, synthetic construct
  source 1..19: mol_type = other RNA
tgccatcagacccagcaac

SEQ ID NO: 579 - RNA, 19 nt, synthetic construct
  source 1..19: mol_type = other RNA
gttgctgggtctgatggca

SEQ ID NO: 580 - RNA, 19 nt, synthetic construct
  source 1..19: mol_type = other RNA
gccatcagacccagcaact

SEQ ID NO: 581 - RNA, 19 nt, synthetic construct
  source 1..19: mol_type = other RNA
agttgctgggtctgatggc

SEQ ID NO: 582 - RNA, 19 nt, synthetic construct
  source 1..19: mol_type = other RNA
tcagacccagcaactctca

SEQ ID NO: 583 - RNA, 19 nt, synthetic construct
  source 1..19: mol_type = other RNA
tgagagttgctgggtctga

SEQ ID NO: 584 - RNA, 19 nt, synthetic construct
  source 1..19: mol_type = other RNA
cagacccagcaactctcaa

SEQ ID NO: 585 - RNA, 19 nt, synthetic construct
  source 1..19: mol_type = other RNA
ttgagagttgctgggtctg

SEQ ID NO: 586 - RNA, 19 nt, synthetic construct
  source 1..19: mol_type = other RNA
gacccagcaactctcaagt

SEQ ID NO: 587 - RNA, 19 nt, synthetic construct
  source 1..19: mol_type = other RNA
acttgagagttgctgggtc

SEQ ID NO: 588 - RNA, 19 nt, synthetic construct
  source 1..19: mol_type = other RNA
ttcatgtctactgtgatgt

SEQ ID NO: 589 - RNA, 19 nt, synthetic construct
  source 1..19: mol_type = other RNA
acatcacagtagacatgaa

SEQ ID NO: 590 - RNA, 19 nt, synthetic construct
  source 1..19: mol_type = other RNA
tcatgtctactgtgatgtt

SEQ ID NO: 591 - RNA, 19 nt, synthetic construct
  source 1..19: mol_type = other RNA
aacatcacagtagacatga

SEQ ID NO: 592 - RNA, 19 nt, synthetic construct
  source 1..19: mol_type = other RNA
catgtctactgtgatgtta

SEQ ID NO: 593 - RNA, 19 nt, synthetic construct
  source 1..19: mol_type = other RNA
taacatcacagtagacatg

SEQ ID NO: 594 - RNA, 19 nt, synthetic construct
  source 1..19: mol_type = other RNA
atgtctactgtgatgttat

SEQ ID NO: 595 - RNA, 19 nt, synthetic construct
  source 1..19: mol_type = other RNA
ataacatcacagtagacat

SEQ ID NO: 596 - RNA, 19 nt, synthetic construct
  source 1..19: mol_type = other RNA
tgtctactgtgatgttata

SEQ ID NO: 597 - RNA, 19 nt, synthetic construct
  source 1..19: mol_type = other RNA
tataacatcacagtagaca

SEQ ID NO: 598 - RNA, 19 nt, synthetic construct
  source 1..19: mol_type = other RNA
gatgttatatcaggtagtc

SEQ ID NO: 599 - RNA, 19 nt, synthetic construct
  source 1..19: mol_type = other RNA
gactacctgatataacatc

SEQ ID NO: 600 - RNA, 19 nt, synthetic construct
  source 1..19: mol_type = other RNA
atgttatatcaggtagtcc

SEQ ID NO: 601 - RNA, 19 nt, synthetic construct
  source 1..19: mol_type = other RNA
ggactacctgatataacat

SEQ ID NO: 602 - RNA, 19 nt, synthetic construct
  source 1..19: mol_type = other RNA
tgttatatcaggtagtcca

SEQ ID NO: 603 - RNA, 19 nt, synthetic construct
  source 1..19: mol_type = other RNA
tggactacctgatataaca

SEQ ID NO: 604 - RNA, 19 nt, synthetic construct
  source 1..19: mol_type = other RNA
gttatatcaggtagtccat

SEQ ID NO: 605 - RNA, 19 nt, synthetic construct
  source 1..19: mol_type = other RNA
atggactacctgatataac

SEQ ID NO: 606 - RNA, 19 nt, synthetic construct
  source 1..19: mol_type = other RNA
tatcaggtagtccatggac

SEQ ID NO: 607 - RNA, 19 nt, synthetic construct
  source 1..19: mol_type = other RNA
gtccatggactacctgata

SEQ ID NO: 608 - RNA, 19 nt, synthetic construct
  source 1..19: mol_type = other RNA
atcaggtagtccatggaca

SEQ ID NO: 609 - RNA, 19 nt, synthetic construct
  source 1..19: mol_type = other RNA
tgtccatggactacctgat

SEQ ID NO: 610 - RNA, 19 nt, synthetic construct
  source 1..19: mol_type = other RNA
tcaggtagtccatggacat

SEQ ID NO: 611 - RNA, 19 nt, synthetic construct
  source 1..19: mol_type = other RNA
atgtccatggactacctga

SEQ ID NO: 612 - RNA, 19 nt, synthetic construct
  source 1..19: mol_type = other RNA
caggtagtccatggacatt

SEQ ID NO: 613 - RNA, 19 nt, synthetic construct
  source 1..19: mol_type = other RNA
aatgtccatggactacctg

SEQ ID NO: 614 - RNA, 19 nt, synthetic construct
  source 1..19: mol_type = other RNA
aggtagtccatggacatta

SEQ ID NO: 615 - RNA, 19 nt, synthetic construct
  source 1..19: mol_type = other RNA
taatgtccatggactacct

SEQ ID NO: 616 - RNA, 19 nt, synthetic construct
  source 1..19: mol_type = other RNA
ggtagtccatggacattaa

SEQ ID NO: 617 - RNA, 19 nt, synthetic construct
  source 1..19: mol_type = other RNA
ttaatgtccatggactacc

SEQ ID NO: 618 - RNA, 19 nt, synthetic construct
  source 1..19: mol_type = other RNA
gtagtccatggacattaat

SEQ ID NO: 619 - RNA, 19 nt, synthetic construct
  source 1..19: mol_type = other RNA
attaatgtccatggactac

SEQ ID NO: 620 - RNA, 19 nt, synthetic construct
  source 1..19: mol_type = other RNA
tagtccatggacattaatt

SEQ ID NO: 621 - RNA, 19 nt, synthetic construct
  source 1..19: mol_type = other RNA
aattaatgtccatggacta

SEQ ID NO: 622 - RNA, 19 nt, synthetic construct
  source 1..19: mol_type = other RNA
agtccatggacattaattc

SEQ ID NO: 623 - RNA, 19 nt, synthetic construct
  source 1..19: mol_type = other RNA
gaattaatgtccatggact

SEQ ID NO: 624 - RNA, 19 nt, synthetic construct
  source 1..19: mol_type = other RNA
gtccatggacattaattca

SEQ ID NO: 625 - RNA, 19 nt, synthetic construct
  source 1..19: mol_type = other RNA
tgaattaatgtccatggac

SEQ ID NO: 626 - RNA, 19 nt, synthetic construct
  source 1..19: mol_type = other RNA
tccatggacattaattcaa

SEQ ID NO: 627 - RNA, 19 nt, synthetic construct
  source 1..19: mol_type = other RNA
ttgaattaatgtccatgga

SEQ ID NO: 628 - RNA, 19 nt, synthetic construct
  source 1..19: mol_type = other RNA
ccatggacattaattcaac

SEQ ID NO: 629 - RNA, 19 nt, synthetic construct
  source 1..19: mol_type = other RNA
gttgaattaatgtccatgg

SEQ ID NO: 630 - RNA, 19 nt, synthetic construct
  source 1..19: mol_type = other RNA
atcgaatagatggatcaca

SEQ ID NO: 631 - RNA, 19 nt, synthetic construct
  source 1..19: mol_type = other RNA
tgtgatccatctattcgat

SEQ ID NO: 632 - RNA, 19 nt, synthetic construct
  source 1..19: mol_type = other RNA
aatatggttttgggaggct

SEQ ID NO: 633 - RNA, 19 nt, synthetic construct
  source 1..19: mol_type = other RNA
agcctcccaaaaccatatt

SEQ ID NO: 634 - RNA, 19 nt, synthetic construct
  source 1..19: mol_type = other RNA
atatggttttgggaggctt

SEQ ID NO: 635 - RNA, 19 nt, synthetic construct
  source 1..19: mol_type = other RNA
aagcctcccaaaaccatat

SEQ ID NO: 636 - RNA, 19 nt, synthetic construct
  source 1..19: mol_type = other RNA
tatggttttgggaggcttg

SEQ ID NO: 637 - RNA, 19 nt, synthetic construct
  source 1..19: mol_type = other RNA
caagcctcccaaaaccata

SEQ ID NO: 638 - RNA, 19 nt, synthetic construct
  source 1..19: mol_type = other RNA
atggttttgggaggcttga

SEQ ID NO: 639 - RNA, 19 nt, synthetic construct
  source 1..19: mol_type = other RNA
tcaagcctcccaaaaccat

SEQ ID NO: 640 - RNA, 19 nt, synthetic construct
  source 1..19: mol_type = other RNA
tggttttgggaggcttgat

SEQ ID NO: 641 - RNA, 19 nt, synthetic construct
  source 1..19: mol_type = other RNA
atcaagcctcccaaaacca

SEQ ID NO: 642 - RNA, 19 nt, synthetic construct
  source 1..19: mol_type = other RNA
ggttttgggaggcttgatg

SEQ ID NO: 643 - RNA, 19 nt, synthetic construct
  source 1..19: mol_type = other RNA
catcaagcctcccaaaacc

SEQ ID NO: 644 - RNA, 19 nt, synthetic construct
  source 1..19: mol_type = other RNA
gttttgggaggcttgatgg

SEQ ID NO: 645 - RNA, 19 nt, synthetic construct
  source 1..19: mol_type = other RNA
ccatcaagcctcccaaaac

SEQ ID NO: 646 - RNA, 19 nt, synthetic construct
  source 1..19: mol_type = other RNA
ttttgggaggcttgatgga

SEQ ID NO: 647 - RNA, 19 nt, synthetic construct
  source 1..19: mol_type = other RNA
tccatcaagcctcccaaaa

SEQ ID NO: 648 - RNA, 19 nt, synthetic construct
  source 1..19: mol_type = other RNA
agaattttggttgggccta

SEQ ID NO: 649 - RNA, 19 nt, synthetic construct
  source 1..19: mol_type = other RNA
taggcccaaccaaaattct

SEQ ID NO: 650 - RNA, 19 nt, synthetic construct
  source 1..19: mol_type = other RNA
gaattttggttgggcctag

SEQ ID NO: 651 - RNA, 19 nt, synthetic construct
  source 1..19: mol_type = other RNA
ctaggcccaaccaaaattc

SEQ ID NO: 652 - RNA, 19 nt, synthetic construct
  source 1..19: mol_type = other RNA
aattttggttgggcctaga

SEQ ID NO: 653 - RNA, 19 nt, synthetic construct
  source 1..19: mol_type = other RNA
tctaggcccaaccaaaatt

SEQ ID NO: 654 - RNA, 19 nt, synthetic construct
  source 1..19: mol_type = other RNA
attttggttgggcctagag

SEQ ID NO: 655 - RNA, 19 nt, synthetic construct
  source 1..19: mol_type = other RNA
ctctaggcccaaccaaaat

SEQ ID NO: 656 - RNA, 19 nt, synthetic construct
  source 1..19: mol_type = other RNA
agaagatatactccatagt

SEQ ID NO: 657 - RNA, 19 nt, synthetic construct
  source 1..19: mol_type = other RNA
actatggagtatatcttct

SEQ ID NO: 658 - RNA, 19 nt, synthetic construct
  source 1..19: mol_type = other RNA
gaagatatactccatagtg

SEQ ID NO: 659 - RNA, 19 nt, synthetic construct
  source 1..19: mol_type = other RNA
cactatggagtatatcttc

SEQ ID NO: 660 - RNA, 19 nt, synthetic construct
  source 1..19: mol_type = other RNA
aagatatactccatagtga

SEQ ID NO: 661 - RNA, 19 nt, synthetic construct
  source 1..19: mol_type = other RNA
tcactatggagtatatctt

SEQ ID NO: 662 - RNA, 19 nt, synthetic construct
  source 1..19: mol_type = other RNA
gatatactccatagtgaag

SEQ ID NO: 663 - RNA, 19 nt, synthetic construct
  source 1..19: mol_type = other RNA
cttcactatggagtatatc

SEQ ID NO: 664 - RNA, 19 nt, synthetic construct
  source 1..19: mol_type = other RNA
atatactccatagtgaagc

SEQ ID NO: 665 - RNA, 19 nt, synthetic construct
  source 1..19: mol_type = other RNA
gcttcactatggagtatat

SEQ ID NO: 666 - RNA, 19 nt, synthetic construct
  source 1..19: mol_type = other RNA
tatactccatagtgaagca

SEQ ID NO: 667 - RNA, 19 nt, synthetic construct
  source 1..19: mol_type = other RNA
tgcttcactatggagtata

SEQ ID NO: 668 - RNA, 19 nt, synthetic construct
  source 1..19: mol_type = other RNA
atactccatagtgaagcaa

SEQ ID NO: 669 - RNA, 19 nt, synthetic construct
  source 1..19: mol_type = other RNA
ttgcttcactatggagtat

SEQ ID NO: 670 - RNA, 19 nt, synthetic construct
  source 1..19: mol_type = other RNA
tactccatagtgaagcaat

SEQ ID NO: 671 - RNA, 19 nt, synthetic construct
  source 1..19: mol_type = other RNA
attgcttcactatggagta

SEQ ID NO: 672 - RNA, 19 nt, synthetic construct
  source 1..19: mol_type = other RNA
actccatagtgaagcaatc

SEQ ID NO: 673 - RNA, 19 nt, synthetic construct
  source 1..19: mol_type = other RNA
gattgcttcactatggagt

SEQ ID NO: 674 - RNA, 19 nt, synthetic construct
  source 1..19: mol_type = other RNA
ctccatagtgaagcaatct

SEQ ID NO: 675 - RNA, 19 nt, synthetic construct
  source 1..19: mol_type = other RNA
agattgcttcactatggag

SEQ ID NO: 676 - RNA, 19 nt, synthetic construct
  source 1..19: mol_type = other RNA
tccatagtgaagcaatcta

SEQ ID NO: 677 - RNA, 19 nt, synthetic construct
  source 1..19: mol_type = other RNA
tagattgcttcactatgga

SEQ ID NO: 678 - RNA, 19 nt, synthetic construct
  source 1..19: mol_type = other RNA
ccatagtgaagcaatctaa

SEQ ID NO: 679 - RNA, 19 nt, synthetic construct
  source 1..19: mol_type = other RNA
ttagattgcttcactatgg

SEQ ID NO: 680 - RNA, 19 nt, synthetic construct
  source 1..19: mol_type = other RNA
catagtgaagcaatctaat

SEQ ID NO: 681 - RNA, 19 nt, synthetic construct
  source 1..19: mol_type = other RNA
attagattgcttcactatg

SEQ ID NO: 682 - RNA, 19 nt, synthetic construct
  source 1..19: mol_type = other RNA
gtgaagcaatctaattatg

SEQ ID NO: 683 - RNA, 19 nt, synthetic construct
  source 1..19: mol_type = other RNA
cataattagattgcttcac

SEQ ID NO: 684 - RNA, 19 nt, synthetic construct
  source 1..19: mol_type = other RNA
caactatacgctacatcta

SEQ ID NO: 685 - RNA, 19 nt, synthetic construct
  source 1..19: mol_type = other RNA
tagatgtagcgtatagttg

SEQ ID NO: 686 - RNA, 19 nt, synthetic construct
  source 1..19: mol_type = other RNA
aactatacgctacatctag

SEQ ID NO: 687 - RNA, 19 nt, synthetic construct
  source 1..19: mol_type = other RNA
ctagatgtagcgtatagtt

SEQ ID NO: 688 - RNA, 19 nt, synthetic construct
  source 1..19: mol_type = other RNA
tacgctacatctagttgcg

SEQ ID NO: 689 - RNA, 19 nt, synthetic construct
  source 1..19: mol_type = other RNA
cgcaactagatgtagcgta

SEQ ID NO: 690 - RNA, 19 nt, synthetic construct
  source 1..19: mol_type = other RNA
acgctacatctagttgcga

SEQ ID NO: 691 - RNA, 19 nt, synthetic construct
  source 1..19: mol_type = other RNA
tcgcaactagatgtagcgt

SEQ ID NO: 692 - RNA, 19 nt, synthetic construct
  source 1..19: mol_type = other RNA
cgctacatctagttgcgat

SEQ ID NO: 693 - RNA, 19 nt, synthetic construct
  source 1..19: mol_type = other RNA
atcgcaactagatgtagcg

SEQ ID NO: 694 - RNA, 19 nt, synthetic construct
  source 1..19: mol_type = other RNA
gctacatctagttgcgatt

SEQ ID NO: 695 - RNA, 19 nt, synthetic construct
  source 1..19: mol_type = other RNA
aatcgcaactagatgtagc

SEQ ID NO: 696 - RNA, 19 nt, synthetic construct
  source 1..19: mol_type = other RNA
ctacatctagttgcgatta

SEQ ID NO: 697 - RNA, 19 nt, synthetic construct
  source 1..19: mol_type = other RNA
taatcgcaactagatgtag

SEQ ID NO: 698 - RNA, 19 nt, synthetic construct
  source 1..19: mol_type = other RNA
tacatctagttgcgattac

SEQ ID NO: 699 - RNA, 19 nt, synthetic construct
  source 1..19: mol_type = other RNA
gtaatcgcaactagatgta

SEQ ID NO: 700 - RNA, 19 nt, synthetic construct
  source 1..19: mol_type = other RNA
acatctagttgcgattact

SEQ ID NO: 701 - RNA, 19 nt, synthetic construct
  source 1..19: mol_type = other RNA
agtaatcgcaactagatgt

SEQ ID NO: 702 - RNA, 19 nt, synthetic construct
  source 1..19: mol_type = other RNA
tgcgattactggcaatgtc

SEQ ID NO: 703 - RNA, 19 nt, synthetic construct
  source 1..19: mol_type = other RNA
gacattgccagtaatcgca

SEQ ID NO: 704 - RNA, 19 nt, synthetic construct
  source 1..19: mol_type = other RNA
gcgattactggcaatgtcc

SEQ ID NO: 705 - RNA, 19 nt, synthetic construct
  source 1..19: mol_type = other RNA
ggacattgccagtaatcgc

SEQ ID NO: 706 - RNA, 19 nt, synthetic construct
  source 1..19: mol_type = other RNA
cgattactggcaatgtccc

SEQ ID NO: 707 - RNA, 19 nt, synthetic construct
  source 1..19: mol_type = other RNA
gggacattgccagtaatcg

SEQ ID NO: 708 - RNA, 19 nt, synthetic construct
  source 1..19: mol_type = other RNA
caaagatttggtgttttct

SEQ ID NO: 709 - RNA, 19 nt, synthetic construct
  source 1..19: mol_type = other RNA
agaaaacaccaaatctttg

SEQ ID NO: 710 - RNA, 19 nt, synthetic construct
  source 1..19: mol_type = other RNA
tttggtgttttctacttgg

SEQ ID NO: 711 - RNA, 19 nt, synthetic construct
  source 1..19: mol_type = other RNA
ccaagtagaaaacaccaaa

SEQ ID NO: 712 - RNA, 19 nt, synthetic construct
  source 1..19: mol_type = other RNA
ttggtgttttctacttggg

SEQ ID NO: 713 - RNA, 19 nt, synthetic construct
  source 1..19: mol_type = other RNA
cccaagtagaaaacaccaa

SEQ ID NO: 714 - RNA, 19 nt, synthetic construct
  source 1..19: mol_type = other RNA
gttttctacttgggatcac

SEQ ID NO: 715 - RNA, 19 nt, synthetic construct
  source 1..19: mol_type = other RNA
gtgatcccaagtagaaaac

SEQ ID NO: 716 - RNA, 19 nt, synthetic construct
  source 1..19: mol_type = other RNA
ttttctacttgggatcaca

SEQ ID NO: 717 - RNA, 19 nt, synthetic construct
  source 1..19: mol_type = other RNA
tgtgatcccaagtagaaaa

SEQ ID NO: 718 - RNA, 19 nt, synthetic construct
  source 1..19: mol_type = other RNA
aagcaaaaggacacttcaa

SEQ ID NO: 719 - RNA, 19 nt, synthetic construct
  source 1..19: mol_type = other RNA
ttgaagtgtccttttgctt

SEQ ID NO: 720 - RNA, 19 nt, synthetic construct
  source 1..19: mol_type = other RNA
agcaaaaggacacttcaac

SEQ ID NO: 721 - RNA, 19 nt, synthetic construct
  source 1..19: mol_type = other RNA
gttgaagtgtccttttgct

SEQ ID NO: 722 - RNA, 19 nt, synthetic construct
  source 1..19: mol_type = other RNA
gcaaaaggacacttcaact

SEQ ID NO: 723 - RNA, 19 nt, synthetic construct
  source 1..19: mol_type = other RNA
agttgaagtgtccttttgc

SEQ ID NO: 724 - RNA, 19 nt, synthetic construct
  source 1..19: mol_type = other RNA
caaaaggacacttcaactg

SEQ ID NO: 725 - RNA, 19 nt, synthetic construct
  source 1..19: mol_type = other RNA
cagttgaagtgtccttttg

SEQ ID NO: 726 - RNA, 19 nt, synthetic construct
  source 1..19: mol_type = other RNA
aaaaggacacttcaactgt

SEQ ID NO: 727 - RNA, 19 nt, synthetic construct
  source 1..19: mol_type = other RNA
acagttgaagtgtcctttt

SEQ ID NO: 728 - RNA, 19 nt, synthetic construct
  source 1..19: mol_type = other RNA
cttcaactgtccagagggt

SEQ ID NO: 729 - RNA, 19 nt, synthetic construct
  source 1..19: mol_type = other RNA
accctctggacagttgaag

SEQ ID NO: 730 - RNA, 19 nt, synthetic construct
  source 1..19: mol_type = other RNA
ttcaactgtccagagggtt

SEQ ID NO: 731 - RNA, 19 nt, synthetic construct
  source 1..19: mol_type = other RNA
aaccctctggacagttgaa

SEQ ID NO: 732 - RNA, 19 nt, synthetic construct
  source 1..19: mol_type = other RNA
tcaactgtccagagggtta

SEQ ID NO: 733 - RNA, 19 nt, synthetic construct
  source 1..19: mol_type = other RNA
taaccctctggacagttga

SEQ ID NO: 734 - RNA, 19 nt, synthetic construct
  source 1..19: mol_type = other RNA
caactgtccagagggttat

SEQ ID NO: 735 - RNA, 19 nt, synthetic construct
  source 1..19: mol_type = other RNA
ataaccctctggacagttg

SEQ ID NO: 736 - RNA, 19 nt, synthetic construct
  source 1..19: mol_type = other RNA
aactgtccagagggttatt

SEQ ID NO: 737 - RNA, 19 nt, synthetic construct
  source 1..19: mol_type = other RNA
aataaccctctggacagtt

SEQ ID NO: 738 - RNA, 19 nt, synthetic construct
  source 1..19: mol_type = other RNA
actgtccagagggttattc

SEQ ID NO: 739 - RNA, 19 nt, synthetic construct
  source 1..19: mol_type = other RNA
gaataaccctctggacagt

SEQ ID NO: 740 - RNA, 19 nt, synthetic construct
  source 1..19: mol_type = other RNA
ctgtccagagggttattca

SEQ ID NO: 741 - RNA, 19 nt, synthetic construct
  source 1..19: mol_type = other RNA
tgaataaccctctggacag

SEQ ID NO: 742 - RNA, 19 nt, synthetic construct
  source 1..19: mol_type = other RNA
tgtccagagggttattcag

SEQ ID NO: 743 - RNA, 19 nt, synthetic construct
  source 1..19: mol_type = other RNA
ctgaataaccctctggaca

SEQ ID NO: 744 - RNA, 19 nt, synthetic construct
  source 1..19: mol_type = other RNA
gtccagagggttattcagg

SEQ ID NO: 745 - RNA, 19 nt, synthetic construct
  source 1..19: mol_type = other RNA
cctgaataaccctctggac

SEQ ID NO: 746 - RNA, 19 nt, synthetic construct
  source 1..19: mol_type = other RNA
agagggttattcaggaggc

SEQ ID NO: 747 - RNA, 19 nt, synthetic construct
  source 1..19: mol_type = other RNA
gcctcctgaataaccctct

SEQ ID NO: 748 - RNA, 19 nt, synthetic construct
  source 1..19: mol_type = other RNA
gagggttattcaggaggct

SEQ ID NO: 749 - RNA, 19 nt, synthetic construct
  source 1..19: mol_type = other RNA
agcctcctgaataaccctc

SEQ ID NO: 750 - RNA, 19 nt, synthetic construct
  source 1..19: mol_type = other RNA
agggttattcaggaggctg

SEQ ID NO: 751 - RNA, 19 nt, synthetic construct
  source 1..19: mol_type = other RNA
cagcctcctgaataaccct

SEQ ID NO: 752 - RNA, 19 nt, synthetic construct
  source 1..19: mol_type = other RNA
gggttattcaggaggctgg

SEQ ID NO: 753 - RNA, 19 nt, synthetic construct
  source 1..19: mol_type = other RNA
ccagcctcctgaataaccc

SEQ ID NO: 754 - RNA, 19 nt, synthetic construct
  source 1..19: mol_type = other RNA
ggttattcaggaggctggt

SEQ ID NO: 755 - RNA, 19 nt, synthetic construct
  source 1..19: mol_type = other RNA
accagcctcctgaataacc

SEQ ID NO: 756 - RNA, 19 nt, synthetic construct
  source 1..19: mol_type = other RNA
gttattcaggaggctggtg

SEQ ID NO: 757 - RNA, 19 nt, synthetic construct
  source 1..19: mol_type = other RNA
caccagcctcctgaataac

SEQ ID NO: 758 - RNA, 19 nt, synthetic construct
  source 1..19: mol_type = other RNA
ttattcaggaggctggtgg

SEQ ID NO: 759 - RNA, 19 nt, synthetic construct
  source 1..19: mol_type = other RNA
ccaccagcctcctgaataa

SEQ ID NO: 760 - RNA, 19 nt, synthetic construct
  source 1..19: mol_type = other RNA
tattcaggaggctggtggt

SEQ ID NO: 761 - RNA, 19 nt, synthetic construct
  source 1..19: mol_type = other RNA
accaccagcctcctgaata

SEQ ID NO: 762 - RNA, 19 nt, synthetic construct
  source 1..19: mol_type = other RNA
attcaggaggctggtggtg

SEQ ID NO: 763 - RNA, 19 nt, synthetic construct
  source 1..19: mol_type = other RNA
caccaccagcctcctgaat

SEQ ID NO: 764 - RNA, 19 nt, synthetic construct
  source 1..19: mol_type = other RNA
ttcaggaggctggtggtgg

SEQ ID NO: 765 - RNA, 19 nt, synthetic construct
  source 1..19: mol_type = other RNA
ccaccaccagcctcctgaa

SEQ ID NO: 766 - RNA, 19 nt, synthetic construct
  source 1..19: mol_type = other RNA
gaggctggtggtggcatga

SEQ ID NO: 767 - RNA, 19 nt, synthetic construct
  source 1..19: mol_type = other RNA
tcatgccaccaccagcctc

SEQ ID NO: 768 - RNA, 19 nt, synthetic construct
  source 1..19: mol_type = other RNA
aggctggtggtggcatgat

SEQ ID NO: 769 - RNA, 19 nt, synthetic construct
  source 1..19: mol_type = other RNA
atcatgccaccaccagcct

SEQ ID NO: 770 - RNA, 19 nt, synthetic construct
  source 1..19: mol_type = other RNA
ctggtggtggcatgatgag

SEQ ID NO: 771 - RNA, 19 nt, synthetic construct
  source 1..19: mol_type = other RNA
ctcatcatgccaccaccag

SEQ ID NO: 772 - RNA, 19 nt, synthetic construct
  source 1..19: mol_type = other RNA
tggtggtggcatgatgagt

SEQ ID NO: 773 - RNA, 19 nt, synthetic construct
  source 1..19: mol_type = other RNA
actcatcatgccaccacca

SEQ ID NO: 774 - RNA, 19 nt, synthetic construct
  source 1..19: mol_type = other RNA
ggtggtggcatgatgagtg

SEQ ID NO: 775 - RNA, 19 nt, synthetic construct
  source 1..19: mol_type = other RNA
cactcatcatgccaccacc

SEQ ID NO: 776 - RNA, 19 nt, synthetic construct
  source 1..19: mol_type = other RNA
gtggtggcatgatgagtgt

SEQ ID NO: 777 - RNA, 19 nt, synthetic construct
  source 1..19: mol_type = other RNA
acactcatcatgccaccac

SEQ ID NO: 778 - RNA, 19 nt, synthetic construct
  source 1..19: mol_type = other RNA
tggtggcatgatgagtgtg

SEQ ID NO: 779 - RNA, 19 nt, synthetic construct
  source 1..19: mol_type = other RNA
cacactcatcatgccacca

SEQ ID NO: 780 - RNA, 19 nt, synthetic construct
  source 1..19: mol_type = other RNA
ggtggcatgatgagtgtgg

SEQ ID NO: 781 - RNA, 19 nt, synthetic construct
  source 1..19: mol_type = other RNA
ccacactcatcatgccacc

SEQ ID NO: 782 - RNA, 19 nt, synthetic construct
  source 1..19: mol_type = other RNA
gtggcatgatgagtgtgga

SEQ ID NO: 783 - RNA, 19 nt, synthetic construct
  source 1..19: mol_type = other RNA
tccacactcatcatgccac

SEQ ID NO: 784 - RNA, 19 nt, synthetic construct
  source 1..19: mol_type = other RNA
tggcatgatgagtgtggag

SEQ ID NO: 785 - RNA, 19 nt, synthetic construct
  source 1..19: mol_type = other RNA
ctccacactcatcatgcca

SEQ ID NO: 786 - RNA, 19 nt, synthetic construct
  source 1..19: mol_type = other RNA
accaagagcaaaatctaag

SEQ ID NO: 787 - RNA, 19 nt, synthetic construct
  source 1..19: mol_type = other RNA
cttagattttgctcttggt

SEQ ID NO: 788 - RNA, 19 nt, synthetic construct
  source 1..19: mol_type = other RNA
ccaagagcaaaatctaagc

SEQ ID NO: 789 - RNA, 19 nt, synthetic construct
  source 1..19: mol_type = other RNA
gcttagattttgctcttgg

SEQ ID NO: 790 - RNA, 19 nt, synthetic construct
  source 1..19: mol_type = other RNA
caagagcaaaatctaagcc

SEQ ID NO: 791 - RNA, 19 nt, synthetic construct
  source 1..19: mol_type = other RNA
ggcttagattttgctcttg

SEQ ID NO: 792 - RNA, 19 nt, synthetic construct
  source 1..19: mol_type = other RNA
agaggattatcttggaagt

SEQ ID NO: 793 - RNA, 19 nt, synthetic construct
  source 1..19: mol_type = other RNA
acttccaagataatcctct

SEQ ID NO: 794 - RNA, 19 nt, synthetic construct
  source 1..19: mol_type = other RNA
gaggattatcttggaagtc

SEQ ID NO: 795 - RNA, 19 nt, synthetic construct
  source 1..19: mol_type = other RNA
gacttccaagataatcctc

SEQ ID NO: 796 - RNA, 19 nt, synthetic construct
  source 1..19: mol_type = other RNA
aggattatcttggaagtct

SEQ ID NO: 797 - RNA, 19 nt, synthetic construct
  source 1..19: mol_type = other RNA
agacttccaagataatcct

SEQ ID NO: 798 - RNA, 19 nt, synthetic construct
  source 1..19: mol_type = other RNA
ggattatcttggaagtctc

SEQ ID NO: 799 - RNA, 19 nt, synthetic construct
  source 1..19: mol_type = other RNA
gagacttccaagataatcc

SEQ ID NO: 800 - RNA, 19 nt, synthetic construct
  source 1..19: mol_type = other RNA
gattatcttggaagtctca

SEQ ID NO: 801 - RNA, 19 nt, synthetic construct
  source 1..19: mol_type = other RNA
tgagacttccaagataatc

SEQ ID NO: 802 - RNA, 19 nt, synthetic construct
  source 1..19: mol_type = other RNA
attatcttggaagtctcaa

SEQ ID NO: 803 - RNA, 19 nt, synthetic construct
  source 1..19: mol_type = other RNA
ttgagacttccaagataat

SEQ ID NO: 804 - RNA, 19 nt, synthetic construct
  source 1..19: mol_type = other RNA
ttatcttggaagtctcaaa

SEQ ID NO: 805 - RNA, 19 nt, synthetic construct
  source 1..19: mol_type = other RNA
tttgagacttccaagataa

SEQ ID NO: 806 - RNA, 19 nt, synthetic construct
  source 1..19: mol_type = other RNA
tatcttggaagtctcaaaa

SEQ ID NO: 807 - RNA, 19 nt, synthetic construct
  source 1..19: mol_type = other RNA
ttttgagacttccaagata

SEQ ID NO: 808 - RNA, 19 nt, synthetic construct
  source 1..19: mol_type = other RNA
atcttggaagtctcaaaat

SEQ ID NO: 809 - RNA, 19 nt, synthetic construct
  source 1..19: mol_type = other RNA
attttgagacttccaagat

SEQ ID NO: 810 - RNA, 19 nt, synthetic construct
  source 1..19: mol_type = other RNA
tcttggaagtctcaaaatg

SEQ ID NO: 811 - RNA, 19 nt, synthetic construct
  source 1..19: mol_type = other RNA
cattttgagacttccaaga

SEQ ID NO: 812 - RNA, 19 nt, synthetic construct
  source 1..19: mol_type = other RNA
cttggaagtctcaaaatgg

SEQ ID NO: 813 - RNA, 19 nt, synthetic construct
  source 1..19: mol_type = other RNA
ccattttgagacttccaag

SEQ ID NO: 814 - RNA, 19 nt, synthetic construct
  source 1..19: mol_type = other RNA
ttggaagtctcaaaatgga

SEQ ID NO: 815 - RNA, 19 nt, synthetic construct
  source 1..19: mol_type = other RNA
tccattttgagacttccaa

SEQ ID NO: 816 - RNA, 19 nt, synthetic construct
  source 1..19: mol_type = other RNA
tggaagtctcaaaatggaa

SEQ ID NO: 817 - RNA, 19 nt, synthetic construct
  source 1..19: mol_type = other RNA
ttccattttgagacttcca

SEQ ID NO: 818 - RNA, 19 nt, synthetic construct
  source 1..19: mol_type = other RNA
ggaagtctcaaaatggaag

SEQ ID NO: 819 - RNA, 19 nt, synthetic construct
  source 1..19: mol_type = other RNA
cttccattttgagacttcc

SEQ ID NO: 820 - RNA, 19 nt, synthetic construct
  source 1..19: mol_type = other RNA
aagtctcaaaatggaaggt

SEQ ID NO: 821 - RNA, 19 nt, synthetic construct
  source 1..19: mol_type = other RNA
accttccattttgagactt

SEQ ID NO: 822 - RNA, 19 nt, synthetic construct
  source 1..19: mol_type = other RNA
agtctcaaaatggaaggtt

SEQ ID NO: 823 - RNA, 19 nt, synthetic construct
  source 1..19: mol_type = other RNA
aaccttccattttgagact

SEQ ID NO: 824 - RNA, 19 nt, synthetic construct
  source 1..19: mol_type = other RNA
gtctcaaaatggaaggtta

SEQ ID NO: 825 - RNA, 19 nt, synthetic construct
  source 1..19: mol_type = other RNA
taaccttccattttgagac

SEQ ID NO: 826 - RNA, 19 nt, synthetic construct
  source 1..19: mol_type = other RNA
tctcaaaatggaaggttat

SEQ ID NO: 827 - RNA, 19 nt, synthetic construct
  source 1..19: mol_type = other RNA
ataaccttccattttgaga

SEQ ID NO: 828 - RNA, 19 nt, synthetic construct
  source 1..19: mol_type = other RNA
ctcaaaatggaaggttata

SEQ ID NO: 829 - RNA, 19 nt, synthetic construct
  source 1..19: mol_type = other RNA
tataaccttccattttgag

SEQ ID NO: 830 - RNA, 19 nt, synthetic construct
  source 1..19: mol_type = other RNA
tcaaaatggaaggttatac

SEQ ID NO: 831 - RNA, 19 nt, synthetic construct
  source 1..19: mol_type = other RNA
gtataaccttccattttga

SEQ ID NO: 832 - RNA, 19 nt, synthetic construct
  source 1..19: mol_type = other RNA
caaaatggaaggttatact

SEQ ID NO: 833 - RNA, 19 nt, synthetic construct
  source 1..19: mol_type = other RNA
agtataaccttccattttg

SEQ ID NO: 834 - RNA, 19 nt, synthetic construct
  source 1..19: mol_type = other RNA
atggaaggttatactctat

SEQ ID NO: 835 - RNA, 19 nt, synthetic construct
  source 1..19: mol_type = other RNA
atagagtataaccttccat

SEQ ID NO: 836 - RNA, 19 nt, synthetic construct
  source 1..19: mol_type = other RNA
aaccaaaatgttgatccat

SEQ ID NO: 837 - RNA, 19 nt, synthetic construct
  source 1..19: mol_type = other RNA
atggatcaacattttggtt

SEQ ID NO: 838 - RNA, 19 nt, synthetic construct
  source 1..19: mol_type = other RNA
ccaaaatgttgatccatcc

SEQ ID NO: 839 - RNA, 19 nt, synthetic construct
  source 1..19: mol_type = other RNA
ggatggatcaacattttgg

SEQ ID NO: 840 - RNA, 19 nt, synthetic construct
  source 1..19: mol_type = other RNA
caaaatgttgatccatcca

SEQ ID NO: 841 - RNA, 19 nt, synthetic construct
  source 1..19: mol_type = other RNA
tggatggatcaacattttg

SEQ ID NO: 842 - RNA, 19 nt, synthetic construct
  source 1..19: mol_type = other RNA
actgaggcaaatttaaaag

SEQ ID NO: 843 - RNA, 19 nt, synthetic construct
  source 1..19: mol_type = other RNA
cttttaaatttgcctcagt

SEQ ID NO: 844 - RNA, 19 nt, synthetic construct
  source 1..19: mol_type = other RNA
ctgaggcaaatttaaaagg

SEQ ID NO: 845 - RNA, 19 nt, synthetic construct
  source 1..19: mol_type = other RNA
ccttttaaatttgcctcag

SEQ ID NO: 846 - RNA, 19 nt, synthetic construct
  source 1..19: mol_type = other RNA
gaggcaaatttaaaaggca

SEQ ID NO: 847 - RNA, 19 nt, synthetic construct
  source 1..19: mol_type = other RNA
tgccttttaaatttgcctc

SEQ ID NO: 848 - RNA, 19 nt, synthetic construct
  source 1..19: mol_type = other RNA
aggcaaatttaaaaggcaa

SEQ ID NO: 849 - RNA, 19 nt, synthetic construct
  source 1..19: mol_type = other RNA
ttgccttttaaatttgcct

SEQ ID NO: 850 - RNA, 19 nt, synthetic construct
  source 1..19: mol_type = other RNA
acattaacctcattccaag

SEQ ID NO: 851 - RNA, 19 nt, synthetic construct
  source 1..19: mol_type = other RNA
cttggaatgaggttaatgt

SEQ ID NO: 852 - RNA, 19 nt, synthetic construct
  source 1..19: mol_type = other RNA
cattaacctcattccaagt

SEQ ID NO: 853 - RNA, 19 nt, synthetic construct
  source 1..19: mol_type = other RNA
acttggaatgaggttaatg

SEQ ID NO: 854 - RNA, 19 nt, synthetic construct
  source 1..19: mol_type = other RNA
attaacctcattccaagtt

SEQ ID NO: 855 - RNA, 19 nt, synthetic construct
  source 1..19: mol_type = other RNA
aacttggaatgaggttaat

SEQ ID NO: 856 - RNA, 19 nt, synthetic construct
  source 1..19: mol_type = other RNA
aacctcattccaagttaat

SEQ ID NO: 857 - RNA, 19 nt, synthetic construct
  source 1..19: mol_type = other RNA
attaacttggaatgaggtt

SEQ ID NO: 858 - RNA, 19 nt, synthetic construct
  source 1..19: mol_type = other RNA
tccaagttaatgtggtcta

SEQ ID NO: 859 - RNA, 19 nt, synthetic construct
  source 1..19: mol_type = other RNA
tagaccacattaacttgga

SEQ ID NO: 860 - RNA, 19 nt, synthetic construct
  source 1..19: mol_type = other RNA
ccaagttaatgtggtctaa

SEQ ID NO: 861 - RNA, 19 nt, synthetic construct
  source 1..19: mol_type = other RNA
ttagaccacattaacttgg

SEQ ID NO: 862 - RNA, 19 nt, synthetic construct
  source 1..19: mol_type = other RNA
caagttaatgtggtctaat

SEQ ID NO: 863 - RNA, 19 nt, synthetic construct
  source 1..19: mol_type = other RNA
attagaccacattaacttg

SEQ ID NO: 864 - RNA, 19 nt, synthetic construct
  source 1..19: mol_type = other RNA
aatgtggtctaataatctg

SEQ ID NO: 865 - RNA, 19 nt, synthetic construct
  source 1..19: mol_type = other RNA
cagattattagaccacatt

SEQ ID NO: 866 - RNA, 19 nt, synthetic construct
  source 1..19: mol_type = other RNA
tggtctaataatctggtat

SEQ ID NO: 867 - RNA, 19 nt, synthetic construct
  source 1..19: mol_type = other RNA
ataccagattattagacca

SEQ ID NO: 868 - RNA, 19 nt, synthetic construct
  source 1..19: mol_type = other RNA
ttatcttaaagtcactgtc

SEQ ID NO: 869 - RNA, 19 nt, synthetic construct
  source 1..19: mol_type = other RNA
gacagtgactttaagataa

SEQ ID NO: 870 - RNA, 19 nt, synthetic construct
  source 1..19: mol_type = other RNA
tatcttaaagtcactgtct

SEQ ID NO: 871 - RNA, 19 nt, synthetic construct
  source 1..19: mol_type = other RNA
agacagtgactttaagata

SEQ ID NO: 872 - RNA, 19 nt, synthetic construct
  source 1..19: mol_type = other RNA
atcttaaagtcactgtcta

SEQ ID NO: 873 - RNA, 19 nt, synthetic construct
  source 1..19: mol_type = other RNA
tagacagtgactttaagat

SEQ ID NO: 874 - RNA, 19 nt, synthetic construct
  source 1..19: mol_type = other RNA
tcttaaagtcactgtctat

SEQ ID NO: 875 - RNA, 19 nt, synthetic construct
  source 1..19: mol_type = other RNA
atagacagtgactttaaga

SEQ ID NO: 876 - RNA, 19 nt, synthetic construct
  source 1..19: mol_type = other RNA
cttaaagtcactgtctatt

SEQ ID NO: 877 - RNA, 19 nt, synthetic construct
  source 1..19: mol_type = other RNA
aatagacagtgactttaag

SEQ ID NO: 878 - RNA, 19 nt, synthetic construct
  source 1..19: mol_type = other RNA
aagtcactgtctatttaag

SEQ ID NO: 879 - RNA, 19 nt, synthetic construct
  source 1..19: mol_type = other RNA
cttaaatagacagtgactt

SEQ ID NO: 880 - RNA, 19 nt, synthetic construct
  source 1..19: mol_type = other RNA
agtcactgtctatttaaga

SEQ ID NO: 881 - RNA, 19 nt, synthetic construct
  source 1..19: mol_type = other RNA
tcttaaatagacagtgact

SEQ ID NO: 882 - RNA, 19 nt, synthetic construct
  source 1..19: mol_type = other RNA
caatcacataaccttaaag

SEQ ID NO: 883 - RNA, 19 nt, synthetic construct
  source 1..19: mol_type = other RNA
ctttaaggttatgtgattg

SEQ ID NO: 884 - RNA, 19 nt, synthetic construct
  source 1..19: mol_type = other RNA
ataaccttaaagaataccg

SEQ ID NO: 885 - RNA, 19 nt, synthetic construct
  source 1..19: mol_type = other RNA
cggtattctttaaggttat

SEQ ID NO: 886 - RNA, 19 nt, synthetic construct
  source 1..19: mol_type = other RNA
taaccttaaagaataccgt

SEQ ID NO: 887 - RNA, 19 nt, synthetic construct
  source 1..19: mol_type = other RNA
acggtattctttaaggtta

SEQ ID NO: 888 - RNA, 19 nt, synthetic construct
  source 1..19: mol_type = other RNA
aaccttaaagaataccgtt

SEQ ID NO: 889 - RNA, 19 nt, synthetic construct
  source 1..19: mol_type = other RNA
aacggtattctttaaggtt

SEQ ID NO: 890 - RNA, 19 nt, synthetic construct
  source 1..19: mol_type = other RNA
accttaaagaataccgttt

SEQ ID NO: 891 - RNA, 19 nt, synthetic construct
  source 1..19: mol_type = other RNA
aaacggtattctttaaggt

SEQ ID NO: 892 - RNA, 19 nt, synthetic construct
  source 1..19: mol_type = other RNA
agaataccgtttacatttc

SEQ ID NO: 893 - RNA, 19 nt, synthetic construct
  source 1..19: mol_type = other RNA
gaaatgtaaacggtattct

SEQ ID NO: 894 - RNA, 19 nt, synthetic construct
  source 1..19: mol_type = other RNA
gaataccgtttacatttct

SEQ ID NO: 895 - RNA, 19 nt, synthetic construct
  source 1..19: mol_type = other RNA
agaaatgtaaacggtattc

SEQ ID NO: 896 - RNA, 19 nt, synthetic construct
  source 1..19: mol_type = other RNA
accgtttacatttctcaat

SEQ ID NO: 897 - RNA, 19 nt, synthetic construct
  source 1..19: mol_type = other RNA
attgagaaatgtaaacggt

SEQ ID NO: 898 - RNA, 19 nt, synthetic construct
  source 1..19: mol_type = other RNA
ccgtttacatttctcaatc

SEQ ID NO: 899 - RNA, 19 nt, synthetic construct
  source 1..19: mol_type = other RNA
gattgagaaatgtaaacgg

SEQ ID NO: 900 - RNA, 19 nt, synthetic construct
  source 1..19: mol_type = other RNA
cgtttacatttctcaatca

SEQ ID NO: 901 - RNA, 19 nt, synthetic construct
  source 1..19: mol_type = other RNA
tgattgagaaatgtaaacg

SEQ ID NO: 902 - RNA, 19 nt, synthetic construct
  source 1..19: mol_type = other RNA
ttaaattttgtgatgtggg

SEQ ID NO: 903 - RNA, 19 nt, synthetic construct
  source 1..19: mol_type = other RNA
cccacatcacaaaatttaa

SEQ ID NO: 904 - RNA, 19 nt, synthetic construct
  source 1..19: mol_type = other RNA
attttgtgatgtgggaatc

SEQ ID NO: 905 - RNA, 19 nt, synthetic construct
  source 1..19: mol_type = other RNA
gattcccacatcacaaaat

SEQ ID NO: 906 - RNA, 19 nt, synthetic construct
  source 1..19: mol_type = other RNA
gatgtgggaatcaatttta

SEQ ID NO: 907 - RNA, 19 nt, synthetic construct
  source 1..19: mol_type = other RNA
taaaattgattcccacatc

SEQ ID NO: 908 - RNA, 19 nt, synthetic construct
  source 1..19: mol_type = other RNA
atgtgggaatcaattttag

SEQ ID NO: 909 - RNA, 19 nt, synthetic construct
  source 1..19: mol_type = other RNA
ctaaaattgattcccacat

SEQ ID NO: 910 - RNA, 19 nt, synthetic construct
  source 1..19: mol_type = other RNA
tgtgggaatcaattttaga

SEQ ID NO: 911 - RNA, 19 nt, synthetic construct
  source 1..19: mol_type = other RNA
tctaaaattgattcccaca

SEQ ID NO: 912 - RNA, 19 nt, synthetic construct
  source 1..19: mol_type = other RNA
gtgggaatcaattttagat

SEQ ID NO: 913 - RNA, 19 nt, synthetic construct
  source 1..19: mol_type = other RNA
atctaaaattgattcccac

SEQ ID NO: 914 - RNA, 19 nt, synthetic construct
  source 1..19: mol_type = other RNA
tgggaatcaattttagatg

SEQ ID NO: 915 - RNA, 19 nt, synthetic construct
  source 1..19: mol_type = other RNA
catctaaaattgattccca

SEQ ID NO: 916 - RNA, 19 nt, synthetic construct
  source 1..19: mol_type = other RNA
gggaatcaattttagatgg

SEQ ID NO: 917 - RNA, 19 nt, synthetic construct
  source 1..19: mol_type = other RNA
ccatctaaaattgattccc

SEQ ID NO: 918 - RNA, 19 nt, synthetic construct
  source 1..19: mol_type = other RNA
ggaatcaattttagatggt

SEQ ID NO: 919 - RNA, 19 nt, synthetic construct
  source 1..19: mol_type = other RNA
accatctaaaattgattcc

SEQ ID NO: 920 - RNA, 19 nt, synthetic construct
  source 1..19: mol_type = other RNA
gaatcaattttagatggtc

SEQ ID NO: 921 - RNA, 19 nt, synthetic construct
  source 1..19: mol_type = other RNA
gaccatctaaaattgattc

SEQ ID NO: 922 - RNA, 19 nt, synthetic construct
  source 1..19: mol_type = other RNA
tcaattttagatggtcaca

SEQ ID NO: 923 - RNA, 19 nt, synthetic construct
  source 1..19: mol_type = other RNA
tgtgaccatctaaaattga

SEQ ID NO: 924 - RNA, 19 nt, synthetic construct
  source 1..19: mol_type = other RNA
ttaaaaggcatcatatgag

SEQ ID NO: 925 - RNA, 19 nt, synthetic construct
  source 1..19: mol_type = other RNA
ctcatatgatgccttttaa

SEQ ID NO: 926 - RNA, 19 nt, synthetic construct
  source 1..19: mol_type = other RNA
aaggcatcatatgagctaa

SEQ ID NO: 927 - RNA, 19 nt, synthetic construct
  source 1..19: mol_type = other RNA
ttagctcatatgatgcctt

SEQ ID NO: 928 - RNA, 19 nt, synthetic construct
  source 1..19: mol_type = other RNA
aggcatcatatgagctaat

SEQ ID NO: 929 - RNA, 19 nt, synthetic construct
  source 1..19: mol_type = other RNA
attagctcatatgatgcct

SEQ ID NO: 930 - RNA, 19 nt, synthetic construct
  source 1..19: mol_type = other RNA
ggcatcatatgagctaata

SEQ ID NO: 931 - RNA, 19 nt, synthetic construct
  source 1..19: mol_type = other RNA
tattagctcatatgatgcc

SEQ ID NO: 932 - RNA, 19 nt, synthetic construct
  source 1..19: mol_type = other RNA
aacttgactaaatacagag

SEQ ID NO: 933 - RNA, 19 nt, synthetic construct
  source 1..19: mol_type = other RNA
ctctgtatttagtcaagtt

SEQ ID NO: 934 - RNA, 19 nt, synthetic construct
  source 1..19: mol_type = other RNA
acttgactaaatacagagg

SEQ ID NO: 935 - RNA, 19 nt, synthetic construct
  source 1..19: mol_type = other RNA
cctctgtatttagtcaagt

SEQ ID NO: 936 - RNA, 19 nt, synthetic construct
  source 1..19: mol_type = other RNA
cttgactaaatacagagga

SEQ ID NO: 937 - RNA, 19 nt, synthetic construct
  source 1..19: mol_type = other RNA
tcctctgtatttagtcaag

SEQ ID NO: 938 - RNA, 19 nt, synthetic construct
  source 1..19: mol_type = other RNA
ttgactaaatacagaggac

SEQ ID NO: 939 - RNA, 19 nt, synthetic construct
  source 1..19: mol_type = other RNA
gtcctctgtatttagtcaa

SEQ ID NO: 940 - RNA, 19 nt, synthetic construct
  source 1..19: mol_type = other RNA
tgactaaatacagaggact

SEQ ID NO: 941 - RNA, 19 nt, synthetic construct
  source 1..19: mol_type = other RNA
agtcctctgtatttagtca

SEQ ID NO: 942 - RNA, 19 nt, synthetic construct
  source 1..19: mol_type = other RNA
taaatacagaggactggta

SEQ ID NO: 943 - RNA, 19 nt, synthetic construct
  source 1..19: mol_type = other RNA
taccagtcctctgtattta

SEQ ID NO: 944 - RNA, 19 nt, synthetic construct
  source 1..19: mol_type = other RNA
aaatacagaggactggtaa

SEQ ID NO: 945 - RNA, 19 nt, synthetic construct
  source 1..19: mol_type = other RNA
ttaccagtcctctgtattt

SEQ ID NO: 946 - RNA, 19 nt, synthetic construct
  source 1..19: mol_type = other RNA
aatacagaggactggtaat

SEQ ID NO: 947 - RNA, 19 nt, synthetic construct
  source 1..19: mol_type = other RNA
attaccagtcctctgtatt

SEQ ID NO: 948 - RNA, 19 nt, synthetic construct
  source 1..19: mol_type = other RNA
tacagaggactggtaattg

SEQ ID NO: 949 - RNA, 19 nt, synthetic construct
  source 1..19: mol_type = other RNA
caattaccagtcctctgta

SEQ ID NO: 950 - RNA, 19 nt, synthetic construct
  source 1..19: mol_type = other RNA
acagaggactggtaattgt

SEQ ID NO: 951 - RNA, 19 nt, synthetic construct
  source 1..19: mol_type = other RNA
acaattaccagtcctctgt

SEQ ID NO: 952 - RNA, 19 nt, synthetic construct
  source 1..19: mol_type = other RNA
cagaggactggtaattgta

SEQ ID NO: 953 - RNA, 19 nt, synthetic construct
  source 1..19: mol_type = other RNA
tacaattaccagtcctctg

SEQ ID NO: 954 - RNA, 19 nt, synthetic construct
  source 1..19: mol_type = other RNA
agaggactggtaattgtac

SEQ ID NO: 955 - RNA, 19 nt, synthetic construct
  source 1..19: mol_type = other RNA
gtacaattaccagtcctct

SEQ ID NO: 956 - RNA, 19 nt, synthetic construct
  source 1..19: mol_type = other RNA
ctggtaattgtacagttct

SEQ ID NO: 957 - RNA, 19 nt, synthetic construct
  source 1..19: mol_type = other RNA
agaactgtacaattaccag

SEQ ID NO: 958 - RNA, 19 nt, synthetic construct
  source 1..19: mol_type = other RNA
tggtaattgtacagttctt

SEQ ID NO: 959 - RNA, 19 nt, synthetic construct
  source 1..19: mol_type = other RNA
aagaactgtacaattacca

SEQ ID NO: 960 - RNA, 19 nt, synthetic construct
  source 1..19: mol_type = other RNA
ggtaattgtacagttctta

SEQ ID NO: 961 - RNA, 19 nt, synthetic construct
  source 1..19: mol_type = other RNA
taagaactgtacaattacc

SEQ ID NO: 962 - RNA, 19 nt, synthetic construct
  source 1..19: mol_type = other RNA
cagttcttaaatgttgtag

SEQ ID NO: 963 - RNA, 19 nt, synthetic construct
  source 1..19: mol_type = other RNA
ctacaacatttaagaactg

SEQ ID NO: 964 - RNA, 19 nt, synthetic construct
  source 1..19: mol_type = other RNA
aaaatcgtcagcacagagt

SEQ ID NO: 965 - RNA, 19 nt, synthetic construct
  source 1..19: mol_type = other RNA
actctgtgctgacgatttt

SEQ ID NO: 966 - RNA, 19 nt, synthetic construct
  source 1..19: mol_type = other RNA
aaatcgtcagcacagagta

SEQ ID NO: 967 - RNA, 19 nt, synthetic construct
  source 1..19: mol_type = other RNA
tactctgtgctgacgattt

SEQ ID NO: 968 - RNA, 19 nt, synthetic construct
  source 1..19: mol_type = other RNA
aatcgtcagcacagagtat

SEQ ID NO: 969 - RNA, 19 nt, synthetic construct
  source 1..19: mol_type = other RNA
atactctgtgctgacgatt

SEQ ID NO: 970 - RNA, 19 nt, synthetic construct
  source 1..19: mol_type = other RNA
atcgtcagcacagagtatg

SEQ ID NO: 971 - RNA, 19 nt, synthetic construct
  source 1..19: mol_type = other RNA
catactctgtgctgacgat

SEQ ID NO: 972 - RNA, 19 nt, synthetic construct
  source 1..19: mol_type = other RNA
aactgatgcttcattttgc

SEQ ID NO: 973 - RNA, 19 nt, synthetic construct
  source 1..19: mol_type = other RNA
gcaaaatgaagcatcagtt

SEQ ID NO: 974 - RNA, 19 nt, synthetic construct
  source 1..19: mol_type = other RNA
actgatgcttcattttgct

SEQ ID NO: 975 - RNA, 19 nt, synthetic construct
  source 1..19: mol_type = other RNA
agcaaaatgaagcatcagt

SEQ ID NO: 976 - RNA, 19 nt, synthetic construct
  source 1..19: mol_type = other RNA
ctgatgcttcattttgcta

SEQ ID NO: 977 - RNA, 19 nt, synthetic construct
  source 1..19: mol_type = other RNA
tagcaaaatgaagcatcag

SEQ ID NO: 978 - RNA, 19 nt, synthetic construct
  source 1..19: mol_type = other RNA
gatgcttcattttgctaca

SEQ ID NO: 979 - RNA, 19 nt, synthetic construct
  source 1..19: mol_type = other RNA
tgtagcaaaatgaagcatc

SEQ ID NO: 980 - RNA, 19 nt, synthetic construct
  source 1..19: mol_type = other RNA
gaagcagaattaaatactg

SEQ ID NO: 981 - RNA, 19 nt, synthetic construct
  source 1..19: mol_type = other RNA
cagtatttaattctgcttc

SEQ ID NO: 982 - RNA, 19 nt, synthetic construct
  source 1..19: mol_type = other RNA
ttaaaataagttcgctgtc

SEQ ID NO: 983 - RNA, 19 nt, synthetic construct
  source 1..19: mol_type = other RNA
gacagcgaacttattttaa

SEQ ID NO: 984 - RNA, 19 nt, synthetic construct
  source 1..19: mol_type = other RNA
taaaataagttcgctgtct

SEQ ID NO: 985 - RNA, 19 nt, synthetic construct
  source 1..19: mol_type = other RNA
agacagcgaacttatttta

SEQ ID NO: 986 - RNA, 19 nt, synthetic construct
  source 1..19: mol_type = other RNA
aaaataagttcgctgtctt

SEQ ID NO: 987 - RNA, 19 nt, synthetic construct
  source 1..19: mol_type = other RNA
aagacagcgaacttatttt

SEQ ID NO: 988 - RNA, 19 nt, synthetic construct
  source 1..19: mol_type = other RNA
taagttcgctgtctttaaa

SEQ ID NO: 989 - RNA, 19 nt, synthetic construct
  source 1..19: mol_type = other RNA
tttaaagacagcgaactta

SEQ ID NO: 990 - RNA, 19 nt, synthetic construct
  source 1..19: mol_type = other RNA
attgtaaaggaatcttgtc

SEQ ID NO: 991 - RNA, 19 nt, synthetic construct
  source 1..19: mol_type = other RNA
gacaagattcctttacaat

SEQ ID NO: 992 - RNA, 19 nt, synthetic construct
  source 1..19: mol_type = other RNA
ttgtaaaggaatcttgtca

SEQ ID NO: 993 - RNA, 19 nt, synthetic construct
  source 1..19: mol_type = other RNA
tgacaagattcctttacaa

SEQ ID NO: 994 - RNA, 19 nt, synthetic construct
  source 1..19: mol_type = other RNA
tgtaaaggaatcttgtcag

SEQ ID NO: 995 - RNA, 19 nt, synthetic construct
  source 1..19: mol_type = other RNA
ctgacaagattcctttaca

SEQ ID NO: 996 - RNA, 19 nt, synthetic construct
  source 1..19: mol_type = other RNA
gtaaaggaatcttgtcaga

SEQ ID NO: 997 - RNA, 19 nt, synthetic construct
  source 1..19: mol_type = other RNA
tctgacaagattcctttac

SEQ ID NO: 998 - RNA, 19 nt, synthetic construct
  source 1..19: mol_type = other RNA
cttgtcagattacagtaag

SEQ ID NO: 999 - RNA, 19 nt, synthetic construct
  source 1..19: mol_type = other RNA
cttactgtaatctgacaag

SEQ ID NO: 1000 - RNA, 19 nt, synthetic construct
  source 1..19: mol_type = other RNA
ttgtcagattacagtaaga

SEQ ID NO: 1001 - RNA, 19 nt, synthetic construct
  source 1..19: mol_type = other RNA
tcttactgtaatctgacaa

SEQ ID NO: 1002 - RNA, 19 nt, synthetic construct
  source 1..19: mol_type = other RNA
tgtcagattacagtaagaa

SEQ ID NO: 1003 - RNA, 19 nt, synthetic construct
  source 1..19: mol_type = other RNA
ttcttactgtaatctgaca

SEQ ID NO: 1004 - RNA, 19 nt, synthetic construct
  source 1..19: mol_type = other RNA
gtcagattacagtaagaat

SEQ ID NO: 1005 - RNA, 19 nt, synthetic construct
  source 1..19: mol_type = other RNA
attcttactgtaatctgac

SEQ ID NO: 1006 - RNA, 19 nt, synthetic construct
  source 1..19: mol_type = other RNA
tcagattacagtaagaatg

SEQ ID NO: 1007 - RNA, 19 nt, synthetic construct
  source 1..19: mol_type = other RNA
cattcttactgtaatctga

SEQ ID NO: 1008 - RNA, 19 nt, synthetic construct
  source 1..19: mol_type = other RNA
tatgctgtgattctaatac

SEQ ID NO: 1009 - RNA, 19 nt, synthetic construct
  source 1..19: mol_type = other RNA
gtattagaatcacagcata

SEQ ID NO: 1010 - RNA, 19 nt, synthetic construct
  source 1..19: mol_type = other RNA
atgctgtgattctaataca

SEQ ID NO: 1011 - RNA, 19 nt, synthetic construct
  source 1..19: mol_type = other RNA
tgtattagaatcacagcat

SEQ ID NO: 1012 - RNA, 19 nt, synthetic construct
  source 1..19: mol_type = other RNA
gctgtgattctaatacatt

SEQ ID NO: 1013 - RNA, 19 nt, synthetic construct
  source 1..19: mol_type = other RNA
aatgtattagaatcacagc

SEQ ID NO: 1014 - RNA, 19 nt, synthetic construct
  source 1..19: mol_type = other RNA
ctgtgattctaatacattc

SEQ ID NO: 1015 - RNA, 19 nt, synthetic construct
  source 1..19: mol_type = other RNA
gaatgtattagaatcacag

SEQ ID NO: 1016 - RNA, 19 nt, synthetic construct
  source 1..19: mol_type = other RNA
tgtgattctaatacattcg

SEQ ID NO: 1017 - RNA, 19 nt, synthetic construct
  source 1..19: mol_type = other RNA
cgaatgtattagaatcaca

SEQ ID NO: 1018 - RNA, 19 nt, synthetic construct
  source 1..19: mol_type = other RNA
gtgattctaatacattcgt

SEQ ID NO: 1019 - RNA, 19 nt, synthetic construct
  source 1..19: mol_type = other RNA
acgaatgtattagaatcac

SEQ ID NO: 1020 - RNA, 19 nt, synthetic construct
  source 1..19: mol_type = other RNA
tgattctaatacattcgtg

SEQ ID NO: 1021 - RNA, 19 nt, synthetic construct
  source 1..19: mol_type = other RNA
cacgaatgtattagaatca

SEQ ID NO: 1022 - RNA, 19 nt, synthetic construct
  source 1..19: mol_type = other RNA
gattctaatacattcgtgt

SEQ ID NO: 1023 - RNA, 19 nt, synthetic construct
  source 1..19: mol_type = other RNA
acacgaatgtattagaatc

SEQ ID NO: 1024 - RNA, 19 nt, synthetic construct
  source 1..19: mol_type = other RNA
acattcgtgtaggttttca

SEQ ID NO: 1025 - RNA, 19 nt, synthetic construct
  source 1..19: mol_type = other RNA
tgaaaacctacacgaatgt

SEQ ID NO: 1026 - RNA, 19 nt, synthetic construct
  source 1..19: mol_type = other RNA
cattcgtgtaggttttcaa

SEQ ID NO: 1027 - RNA, 19 nt, synthetic construct
  source 1..19: mol_type = other RNA
ttgaaaacctacacgaatg

SEQ ID NO: 1028 - RNA, 19 nt, synthetic construct
  source 1..19: mol_type = other RNA
attcgtgtaggttttcaag

SEQ ID NO: 1029 - RNA, 19 nt, synthetic construct
  source 1..19: mol_type = other RNA
cttgaaaacctacacgaat

SEQ ID NO: 1030 - RNA, 19 nt, synthetic construct
  source 1..19: mol_type = other RNA
ttcgtgtaggttttcaagt

SEQ ID NO: 1031 - RNA, 19 nt, synthetic construct
  source 1..19: mol_type = other RNA
acttgaaaacctacacgaa

SEQ ID NO: 1032 - RNA, 19 nt, synthetic construct
  source 1..19: mol_type = other RNA
tcgtgtaggttttcaagta

SEQ ID NO: 1033 - RNA, 19 nt, synthetic construct
  source 1..19: mol_type = other RNA
tacttgaaaacctacacga

SEQ ID NO: 1034 - RNA, 19 nt, synthetic construct
  source 1..19: mol_type = other RNA
cgtgtaggttttcaagtag

SEQ ID NO: 1035 - RNA, 19 nt, synthetic construct
  source 1..19: mol_type = other RNA
ctacttgaaaacctacacg

SEQ ID NO: 1036 - RNA, 19 nt, synthetic construct
  source 1..19: mol_type = other RNA
gtgtaggttttcaagtaga

SEQ ID NO: 1037 - RNA, 19 nt, synthetic construct
  source 1..19: mol_type = other RNA
tctacttgaaaacctacac

SEQ ID NO: 1038 - RNA, 19 nt, synthetic construct
  source 1..19: mol_type = other RNA
caaagacccagtccctaaa

SEQ ID NO: 1039 - RNA, 19 nt, synthetic construct
  source 1..19: mol_type = other RNA
tttagggactgggtctttg

SEQ ID NO: 1040 - RNA, 19 nt, synthetic construct
  source 1..19: mol_type = other RNA
aaagacccagtccctaaat

SEQ ID NO: 1041 - RNA, 19 nt, synthetic construct
  source 1..19: mol_type = other RNA
atttagggactgggtcttt

SEQ ID NO: 1042 - RNA, 19 nt, synthetic construct
  source 1..19: mol_type = other RNA
aagacccagtccctaaatt

SEQ ID NO: 1043 - RNA, 19 nt, synthetic construct
  source 1..19: mol_type = other RNA
aatttagggactgggtctt

SEQ ID NO: 1044 - RNA, 19 nt, synthetic construct
  source 1..19: mol_type = other RNA
gacccagtccctaaattat

SEQ ID NO: 1045 - RNA, 19 nt, synthetic construct
  source 1..19: mol_type = other RNA
ataatttagggactgggtc

SEQ ID NO: 1046 - RNA, 19 nt, synthetic construct
  source 1..19: mol_type = other RNA
tattcttgcatgtttatcg

SEQ ID NO: 1047 - RNA, 19 nt, synthetic construct
  source 1..19: mol_type = other RNA
cgataaacatgcaagaata

SEQ ID NO: 1048 - RNA, 19 nt, synthetic construct
  source 1..19: mol_type = other RNA
attcttgcatgtttatcga

SEQ ID NO: 1049 - RNA, 19 nt, synthetic construct
  source 1..19: mol_type = other RNA
tcgataaacatgcaagaat

SEQ ID NO: 1050 - RNA, 19 nt, synthetic construct
  source 1..19: mol_type = other RNA
ttcttgcatgtttatcgac

SEQ ID NO: 1051 - RNA, 19 nt, synthetic construct
  source 1..19: mol_type = other RNA
gtcgataaacatgcaagaa

SEQ ID NO: 1052 - RNA, 19 nt, synthetic construct
  source 1..19: mol_type = other RNA
tcttgcatgtttatcgaca

SEQ ID NO: 1053 - RNA, 19 nt, synthetic construct
  source 1..19: mol_type = other RNA
tgtcgataaacatgcaaga

SEQ ID NO: 1054 - RNA, 19 nt, synthetic construct
  source 1..19: mol_type = other RNA
aatccctaaatccctaaag

SEQ ID NO: 1055 - RNA, 19 nt, synthetic construct
  source 1..19: mol_type = other RNA
ctttagggatttagggatt

SEQ ID NO: 1056 - RNA, 19 nt, synthetic construct
  source 1..19: mol_type = other RNA
tccctaaatccctaaagat

SEQ ID NO: 1057 - RNA, 19 nt, synthetic construct
  source 1..19: mol_type = other RNA
atctttagggatttaggga

SEQ ID NO: 1058 - RNA, 19 nt, synthetic construct
  source 1..19: mol_type = other RNA
ttttaccacagtatcactt

SEQ ID NO: 1059 - RNA, 19 nt, synthetic construct
  source 1..19: mol_type = other RNA
aagtgatactgtggtaaaa

SEQ ID NO: 1060 - RNA, 19 nt, synthetic construct
  source 1..19: mol_type = other RNA
tttaccacagtatcacttg

SEQ ID NO: 1061 - RNA, 19 nt, synthetic construct
  source 1..19: mol_type = other RNA
caagtgatactgtggtaaa

SEQ ID NO: 1062 - RNA, 19 nt, synthetic construct
  source 1..19: mol_type = other RNA
ttaccacagtatcacttgt

SEQ ID NO: 1063 - RNA, 19 nt, synthetic construct
  source 1..19: mol_type = other RNA
acaagtgatactgtggtaa

SEQ ID NO: 1064 - RNA, 19 nt, synthetic construct
  source 1..19: mol_type = other RNA
taccacagtatcacttgtc

SEQ ID NO: 1065 - RNA, 19 nt, synthetic construct
  source 1..19: mol_type = other RNA
gacaagtgatactgtggta

SEQ ID NO: 1066 - RNA, 19 nt, synthetic construct
  source 1..19: mol_type = other RNA
accacagtatcacttgtca

SEQ ID NO: 1067 - RNA, 19 nt, synthetic construct
  source 1..19: mol_type = other RNA
tgacaagtgatactgtggt

SEQ ID NO: 1068 - RNA, 19 nt, synthetic construct
  source 1..19: mol_type = other RNA
ccacagtatcacttgtcag

SEQ ID NO: 1069 - RNA, 19 nt, synthetic construct
  source 1..19: mol_type = other RNA
ctgacaagtgatactgtgg

SEQ ID NO: 1070 - RNA, 19 nt, synthetic construct
  source 1..19: mol_type = other RNA
cacagtatcacttgtcaga

SEQ ID NO: 1071 - RNA, 19 nt, synthetic construct
  source 1..19: mol_type = other RNA
tctgacaagtgatactgtg

SEQ ID NO: 1072 - RNA, 19 nt, synthetic construct
  source 1..19: mol_type = other RNA
acagtatcacttgtcagaa

SEQ ID NO: 1073 - RNA, 19 nt, synthetic construct
  source 1..19: mol_type = other RNA
ttctgacaagtgatactgt

SEQ ID NO: 1074 - RNA, 19 nt, synthetic construct
  source 1..19: mol_type = other RNA
cagtatcacttgtcagaat

SEQ ID NO: 1075 - RNA, 19 nt, synthetic construct
  source 1..19: mol_type = other RNA
attctgacaagtgatactg

SEQ ID NO: 1076 - RNA, 19 nt, synthetic construct
  source 1..19: mol_type = other RNA
agtatcacttgtcagaatt

SEQ ID NO: 1077 - RNA, 19 nt, synthetic construct
  source 1..19: mol_type = other RNA
aattctgacaagtgatact

SEQ ID NO: 1078 - RNA, 19 nt, synthetic construct
  source 1..19: mol_type = other RNA
ttgttaaaggatatagtgc

SEQ ID NO: 1079 - RNA, 19 nt, synthetic construct
  source 1..19: mol_type = other RNA
gcactatatcctttaacaa

SEQ ID NO: 1080 - RNA, 19 nt, synthetic construct
  source 1..19: mol_type = other RNA
tgttaaaggatatagtgcc

SEQ ID NO: 1081 - RNA, 19 nt, synthetic construct
  source 1..19: mol_type = other RNA
ggcactatatcctttaaca

SEQ ID NO: 1082 - RNA, 19 nt, synthetic construct
  source 1..19: mol_type = other RNA
gttaaaggatatagtgccc

SEQ ID NO: 1083 - RNA, 19 nt, synthetic construct
  source 1..19: mol_type = other RNA
gggcactatatcctttaac

SEQ ID NO: 1084 - RNA, 19 nt, synthetic construct
  source 1..19: mol_type = other RNA
ttaaaggatatagtgccca

SEQ ID NO: 1085 - RNA, 19 nt, synthetic construct
  source 1..19: mol_type = other RNA
tgggcactatatcctttaa

SEQ ID NO: 1086 - RNA, 19 nt, synthetic construct
  source 1..19: mol_type = other RNA
taaaggatatagtgcccaa

SEQ ID NO: 1087 - RNA, 19 nt, synthetic construct
  source 1..19: mol_type = other RNA
ttgggcactatatccttta

SEQ ID NO: 1088 - RNA, 19 nt, synthetic construct
  source 1..19: mol_type = other RNA
aaaggatatagtgcccaag

SEQ ID NO: 1089 - RNA, 19 nt, synthetic construct
  source 1..19: mol_type = other RNA
cttgggcactatatccttt

SEQ ID NO: 1090 - RNA, 19 nt, synthetic construct
  source 1..19: mol_type = other RNA
aaggatatagtgcccaagt

SEQ ID NO: 1091 - RNA, 19 nt, synthetic construct
  source 1..19: mol_type = other RNA
acttgggcactatatcctt

SEQ ID NO: 1092 - RNA, 19 nt, synthetic construct
  source 1..19: mol_type = other RNA
aggatatagtgcccaagtt

SEQ ID NO: 1093 - RNA, 19 nt, synthetic construct
  source 1..19: mol_type = other RNA
aacttgggcactatatcct

SEQ ID NO: 1094 - RNA, 19 nt, synthetic construct
  source 1..19: mol_type = other RNA
ggatatagtgcccaagtta

SEQ ID NO: 1095 - RNA, 19 nt, synthetic construct
  source 1..19: mol_type = other RNA
taacttgggcactatatcc

SEQ ID NO: 1096 - RNA, 19 nt, synthetic construct
  source 1..19: mol_type = other RNA
agtgcccaagttatatggt

SEQ ID NO: 1097 - RNA, 19 nt, synthetic construct
  source 1..19: mol_type = other RNA
accatataacttgggcact

SEQ ID NO: 1098 - RNA, 19 nt, synthetic construct
  source 1..19: mol_type = other RNA
gtgcccaagttatatggtg

SEQ ID NO: 1099 - RNA, 19 nt, synthetic construct
  source 1..19: mol_type = other RNA
caccatataacttgggcac

SEQ ID NO: 1100 - RNA, 19 nt, synthetic construct
  source 1..19: mol_type = other RNA
tgcccaagttatatggtga

SEQ ID NO: 1101 - RNA, 19 nt, synthetic construct
  source 1..19: mol_type = other RNA
tcaccatataacttgggca

SEQ ID NO: 1102 - RNA, 19 nt, synthetic construct
  source 1..19: mol_type = other RNA
gcccaagttatatggtgac

SEQ ID NO: 1103 - RNA, 19 nt, synthetic construct
  source 1..19: mol_type = other RNA
gtcaccatataacttgggc

SEQ ID NO: 1104 - RNA, 19 nt, synthetic construct
  source 1..19: mol_type = other RNA
cccaagttatatggtgacc

SEQ ID NO: 1105 - RNA, 19 nt, synthetic construct
  source 1..19: mol_type = other RNA
ggtcaccatataacttggg

SEQ ID NO: 1106 - RNA, 19 nt, synthetic construct
  source 1..19: mol_type = other RNA
agttatatggtgacctacc

SEQ ID NO: 1107 - RNA, 19 nt, synthetic construct
  source 1..19: mol_type = other RNA
ggtaggtcaccatataact

SEQ ID NO: 1108 - RNA, 19 nt, synthetic construct
  source 1..19: mol_type = other RNA
atatggtgacctacctttg

SEQ ID NO: 1109 - RNA, 19 nt, synthetic construct
  source 1..19: mol_type = other RNA
caaaggtaggtcaccatat

SEQ ID NO: 1110 - RNA, 19 nt, synthetic construct
  source 1..19: mol_type = other RNA
tatggtgacctacctttgt

SEQ ID NO: 1111 - RNA, 19 nt, synthetic construct
  source 1..19: mol_type = other RNA
acaaaggtaggtcaccata

SEQ ID NO: 1112 - RNA, 19 nt, synthetic construct
  source 1..19: mol_type = other RNA
atggtgacctacctttgtc

SEQ ID NO: 1113 - RNA, 19 nt, synthetic construct
  source 1..19: mol_type = other RNA
gacaaaggtaggtcaccat

SEQ ID NO: 1114 - RNA, 19 nt, synthetic construct
  source 1..19: mol_type = other RNA
gacctacctttgtcaatac

SEQ ID NO: 1115 - RNA, 19 nt, synthetic construct
  source 1..19: mol_type = other RNA
gtattgacaaaggtaggtc

SEQ ID NO: 1116 - RNA, 19 nt, synthetic construct
  source 1..19: mol_type = other RNA
acctacctttgtcaatact

SEQ ID NO: 1117 - RNA, 19 nt, synthetic construct
  source 1..19: mol_type = other RNA
agtattgacaaaggtaggt

SEQ ID NO: 1118 - RNA, 19 nt, synthetic construct
  source 1..19: mol_type = other RNA
ctacctttgtcaatactta

SEQ ID NO: 1119 - RNA, 19 nt, synthetic construct
  source 1..19: mol_type = other RNA
taagtattgacaaaggtag

SEQ ID NO: 1120 - RNA, 19 nt, synthetic construct
  source 1..19: mol_type = other RNA
tacctttgtcaatacttag

SEQ ID NO: 1121 - RNA, 19 nt, synthetic construct
  source 1..19: mol_type = other RNA
ctaagtattgacaaaggta

SEQ ID NO: 1122 - RNA, 19 nt, synthetic construct
  source 1..19: mol_type = other RNA
acctttgtcaatacttagc

SEQ ID NO: 1123 - RNA, 19 nt, synthetic construct
  source 1..19: mol_type = other RNA
gctaagtattgacaaaggt

SEQ ID NO: 1124 - RNA, 19 nt, synthetic construct
  source 1..19: mol_type = other RNA
cctttgtcaatacttagca

SEQ ID NO: 1125 - RNA, 19 nt, synthetic construct
  source 1..19: mol_type = other RNA
tgctaagtattgacaaagg

SEQ ID NO: 1126 - RNA, 19 nt, synthetic construct
  source 1..19: mol_type = other RNA
ctttgtcaatacttagcat

SEQ ID NO: 1127 - RNA, 19 nt, synthetic construct
  source 1..19: mol_type = other RNA
atgctaagtattgacaaag

SEQ ID NO: 1128 - RNA, 19 nt, synthetic construct
  source 1..19: mol_type = other RNA
tgtatgatctatgtgaatc

SEQ ID NO: 1129 - RNA, 19 nt, synthetic construct
  source 1..19: mol_type = other RNA
gattcacatagatcataca

SEQ ID NO: 1130 - RNA, 19 nt, synthetic construct
  source 1..19: mol_type = other RNA
tatgatctatgtgaatcct

SEQ ID NO: 1131 - RNA, 19 nt, synthetic construct
  source 1..19: mol_type = other RNA
aggattcacatagatcata

SEQ ID NO: 1132 - RNA, 19 nt, synthetic construct
  source 1..19: mol_type = other RNA
atgatctatgtgaatccta

SEQ ID NO: 1133 - RNA, 19 nt, synthetic construct
  source 1..19: mol_type = other RNA
taggattcacatagatcat

SEQ ID NO: 1134 - RNA, 19 nt, synthetic construct
  source 1..19: mol_type = other RNA
tgatctatgtgaatcctaa

SEQ ID NO: 1135 - RNA, 19 nt, synthetic construct
  source 1..19: mol_type = other RNA
ttaggattcacatagatca

SEQ ID NO: 1136 - RNA, 19 nt, synthetic construct
  source 1..19: mol_type = other RNA
gatctatgtgaatcctaag

SEQ ID NO: 1137 - RNA, 19 nt, synthetic construct
  source 1..19: mol_type = other RNA
cttaggattcacatagatc

SEQ ID NO: 1138 - RNA, 19 nt, synthetic construct
  source 1..19: mol_type = other RNA
atctatgtgaatcctaagt

SEQ ID NO: 1139 - RNA, 19 nt, synthetic construct
  source 1..19: mol_type = other RNA
acttaggattcacatagat

SEQ ID NO: 1140 - RNA, 19 nt, synthetic construct
  source 1..19: mol_type = other RNA
tctatgtgaatcctaagta

SEQ ID NO: 1141 - RNA, 19 nt, synthetic construct
  source 1..19: mol_type = other RNA
tacttaggattcacataga

SEQ ID NO: 1142 - RNA, 19 nt, synthetic construct
  source 1..19: mol_type = other RNA
tctataattttcaggacca

SEQ ID NO: 1143 - RNA, 19 nt, synthetic construct
  source 1..19: mol_type = other RNA
tggtcctgaaaattataga

SEQ ID NO: 1144 - RNA, 19 nt, synthetic construct
  source 1..19: mol_type = other RNA
ctataattttcaggaccac

SEQ ID NO: 1145 - RNA, 19 nt, synthetic construct
  source 1..19: mol_type = other RNA
gtggtcctgaaaattatag

SEQ ID NO: 1146 - RNA, 19 nt, synthetic construct
  source 1..19: mol_type = other RNA
attttcaggaccacagact

SEQ ID NO: 1147 - RNA, 19 nt, synthetic construct
  source 1..19: mol_type = other RNA
agtctgtggtcctgaaaat

SEQ ID NO: 1148 - RNA, 19 nt, synthetic construct
  source 1..19: mol_type = other RNA
ttcaggaccacagactaag

SEQ ID NO: 1149 - RNA, 19 nt, synthetic construct
  source 1..19: mol_type = other RNA
cttagtctgtggtcctgaa

SEQ ID NO: 1150 - RNA, 19 nt, synthetic construct
  source 1..19: mol_type = other RNA
tcaggaccacagactaagc

SEQ ID NO: 1151 - RNA, 19 nt, synthetic construct
  source 1..19: mol_type = other RNA
gcttagtctgtggtcctga

SEQ ID NO: 1152 - RNA, 19 nt, synthetic construct
  source 1..19: mol_type = other RNA
ttttagggccagaatacca

SEQ ID NO: 1153 - RNA, 19 nt, synthetic construct
  source 1..19: mol_type = other RNA
tggtattctggccctaaaa

SEQ ID NO: 1154 - RNA, 19 nt, synthetic construct
  source 1..19: mol_type = other RNA
tttagggccagaataccaa

SEQ ID NO: 1155 - RNA, 19 nt, synthetic construct
  source 1..19: mol_type = other RNA
ttggtattctggccctaaa

SEQ ID NO: 1156 - RNA, 19 nt, synthetic construct
  source 1..19: mol_type = other RNA
ttagggccagaataccaaa

SEQ ID NO: 1157 - RNA, 19 nt, synthetic construct
  source 1..19: mol_type = other RNA
tttggtattctggccctaa

SEQ ID NO: 1158 - RNA, 19 nt, synthetic construct
  source 1..19: mol_type = other RNA
tagggccagaataccaaaa

SEQ ID NO: 1159 - RNA, 19 nt, synthetic construct
  source 1..19: mol_type = other RNA
ttttggtattctggcccta

SEQ ID NO: 1160 - RNA, 19 nt, synthetic construct
  source 1..19: mol_type = other RNA
agggccagaataccaaaat

SEQ ID NO: 1161 - RNA, 19 nt, synthetic construct
  source 1..19: mol_type = other RNA
attttggtattctggccct

SEQ ID NO: 1162 - RNA, 19 nt, synthetic construct
  source 1..19: mol_type = other RNA
gggccagaataccaaaatg

SEQ ID NO: 1163 - RNA, 19 nt, synthetic construct
  source 1..19: mol_type = other RNA
cattttggtattctggccc

SEQ ID NO: 1164 - RNA, 19 nt, synthetic construct
  source 1..19: mol_type = other RNA
ggccagaataccaaaatgg

SEQ ID NO: 1165 - RNA, 19 nt, synthetic construct
  source 1..19: mol_type = other RNA
ccattttggtattctggcc

SEQ ID NO: 1166 - RNA, 19 nt, synthetic construct
  source 1..19: mol_type = other RNA
ccagaataccaaaatggct

SEQ ID NO: 1167 - RNA, 19 nt, synthetic construct
  source 1..19: mol_type = other RNA
agccattttggtattctgg

SEQ ID NO: 1168 - RNA, 19 nt, synthetic construct
  source 1..19: mol_type = other RNA
cagaataccaaaatggctc

SEQ ID NO: 1169 - RNA, 19 nt, synthetic construct
  source 1..19: mol_type = other RNA
gagccattttggtattctg

SEQ ID NO: 1170 - RNA, 19 nt, synthetic construct
  source 1..19: mol_type = other RNA
taccaaaatggctcctctc

SEQ ID NO: 1171 - RNA, 19 nt, synthetic construct
  source 1..19: mol_type = other RNA
gagaggagccattttggta

SEQ ID NO: 1172 - RNA, 19 nt, synthetic construct
  source 1..19: mol_type = other RNA
accaaaatggctcctctct

SEQ ID NO: 1173 - RNA, 19 nt, synthetic construct
  source 1..19: mol_type = other RNA
agagaggagccattttggt

SEQ ID NO: 1174 - RNA, 19 nt, synthetic construct
  source 1..19: mol_type = other RNA
taatatatgagttgcttcc

SEQ ID NO: 1175 - RNA, 19 nt, synthetic construct
  source 1..19: mol_type = other RNA
ggaagcaactcatatatta

SEQ ID NO: 1176 - RNA, 19 nt, synthetic construct
  source 1..19: mol_type = other RNA
aatatatgagttgcttcct

SEQ ID NO: 1177 - RNA, 19 nt, synthetic construct
  source 1..19: mol_type = other RNA
aggaagcaactcatatatt

SEQ ID NO: 1178 - RNA, 19 nt, synthetic construct
  source 1..19: mol_type = other RNA
atatatgagttgcttcctc

SEQ ID NO: 1179 - RNA, 19 nt, synthetic construct
  source 1..19: mol_type = other RNA
gaggaagcaactcatatat

SEQ ID NO: 1180 - RNA, 19 nt, synthetic construct
  source 1..19: mol_type = other RNA
tgagttgcttcctctattt

SEQ ID NO: 1181 - RNA, 19 nt, synthetic construct
  source 1..19: mol_type = other RNA
aaatagaggaagcaactca

SEQ ID NO: 1182 - RNA, 19 nt, synthetic construct
  source 1..19: mol_type = other RNA
gagttgcttcctctatttg

SEQ ID NO: 1183 - RNA, 19 nt, synthetic construct
  source 1..19: mol_type = other RNA
caaatagaggaagcaactc

SEQ ID NO: 1184 - RNA, 19 nt, synthetic construct
  source 1..19: mol_type = other RNA
agttgcttcctctatttgg

SEQ ID NO: 1185 - RNA, 19 nt, synthetic construct
  source 1..19: mol_type = other RNA
ccaaatagaggaagcaact

SEQ ID NO: 1186 - RNA, 19 nt, synthetic construct
  source 1..19: mol_type = other RNA
gttgcttcctctatttggt

SEQ ID NO: 1187 - RNA, 19 nt, synthetic construct
  source 1..19: mol_type = other RNA
accaaatagaggaagcaac

SEQ ID NO: 1188 - RNA, 19 nt, synthetic construct
  source 1..19: mol_type = other RNA
ttgcttcctctatttggtt

SEQ ID NO: 1189 - RNA, 19 nt, synthetic construct
  source 1..19: mol_type = other RNA
aaccaaatagaggaagcaa

SEQ ID NO: 1190 - RNA, 20 nt, synthetic construct
  source 1..20: mol_type = other RNA
gtgtgctcctccattctccc

SEQ ID NO: 1191 - RNA, 20 nt, synthetic construct
  source 1..20: mol_type = other RNA
tgtgtgctcctccattctcc

SEQ ID NO: 1192 - RNA, 20 nt, synthetic construct
  source 1..20: mol_type = other RNA
ctgtgtgctcctccattctc

SEQ ID NO: 1193 - RNA, 20 nt, synthetic construct
  source 1..20: mol_type = other RNA
tctgtgtgctcctccattct

SEQ ID NO: 1194 - RNA, 20 nt, synthetic construct
  source 1..20: mol_type = other RNA
aggatgtcagcaggattgtc

SEQ ID NO: 1195 - RNA, 20 nt, synthetic construct
  source 1..20: mol_type = other RNA
tgcagcaatgactaggatgt

SEQ ID NO: 1196 - RNA, 20 nt, synthetic construct
  source 1..20: mol_type = other RNA
atgcagcaatgactaggatg

SEQ ID NO: 1197 - RNA, 20 nt, synthetic construct
  source 1..20: mol_type = other RNA
tatgcagcaatgactaggat

SEQ ID NO: 1198 - RNA, 20 nt, synthetic construct
  source 1..20: mol_type = other RNA
ggaaatatgcagcaatgact

SEQ ID NO: 1199 - RNA, 20 nt, synthetic construct
  source 1..20: mol_type = other RNA
aggaaatatgcagcaatgac

SEQ ID NO: 1200 - RNA, 20 nt, synthetic construct
  source 1..20: mol_type = other RNA
caggaaatatgcagcaatga

SEQ ID NO: 1201 - RNA, 20 nt, synthetic construct
  source 1..20: mol_type = other RNA
gcaggaaatatgcagcaatg

SEQ ID NO: 1202 - RNA, 20 nt, synthetic construct
  source 1..20: mol_type = other RNA
agcaggaaatatgcagcaat

SEQ ID NO: 1203 - RNA, 20 nt, synthetic construct
  source 1..20: mol_type = other RNA
ccagcaggaaatatgcagca

SEQ ID NO: 1204 - RNA, 20 nt, synthetic construct
  source 1..20: mol_type = other RNA
accagcaggaaatatgcagc

SEQ ID NO: 1205 - RNA, 20 nt, synthetic construct
  source 1..20: mol_type = other RNA
atgaccagcaggaaatatgc

SEQ ID NO: 1206 - RNA, 20 nt, synthetic construct
  source 1..20: mol_type = other RNA
aatgaccagcaggaaatatg

SEQ ID NO: 1207 - RNA, 20 nt, synthetic construct
  source 1..20: mol_type = other RNA
caatgaccagcaggaaatat

SEQ ID NO: 1208 - RNA, 20 nt, synthetic construct
  source 1..20: mol_type = other RNA
ccaatgaccagcaggaaata

SEQ ID NO: 1209 - RNA, 20 nt, synthetic construct
  source 1..20: mol_type = other RNA
gccaatgaccagcaggaaat

SEQ ID NO: 1210 - RNA, 20 nt, synthetic construct
  source 1..20: mol_type = other RNA
acgccaatgaccagcaggaa

SEQ ID NO: 1211 - RNA, 20 nt, synthetic construct
  source 1..20: mol_type = other RNA
aacgccaatgaccagcagga

SEQ ID NO: 1212 - RNA, 20 nt, synthetic construct
  source 1..20: mol_type = other RNA
caacgccaatgaccagcagg

SEQ ID NO: 1213 - RNA, 20 nt, synthetic construct
  source 1..20: mol_type = other RNA
ccaacgccaatgaccagcag

SEQ ID NO: 1214 - RNA, 20 nt, synthetic construct
  source 1..20: mol_type = other RNA
gccaacgccaatgaccagca

SEQ ID NO: 1215 - RNA, 20 nt, synthetic construct
  source 1..20: mol_type = other RNA
agccaacgccaatgaccagc

SEQ ID NO: 1216 - RNA, 20 nt, synthetic construct
  source 1..20: mol_type = other RNA
aagccaacgccaatgaccag

SEQ ID NO: 1217 - RNA, 20 nt, synthetic construct
  source 1..20: mol_type = other RNA
caagccaacgccaatgacca

SEQ ID NO: 1218 - RNA, 20 nt, synthetic construct
  source 1..20: mol_type = other RNA
acaagccaacgccaatgacc

SEQ ID NO: 1219 - RNA, 20 nt, synthetic construct
  source 1..20: mol_type = other RNA
cacaagccaacgccaatgac

SEQ ID NO: 1220 - RNA, 20 nt, synthetic construct
  source 1..20: mol_type = other RNA
ccacaagccaacgccaatga

SEQ ID NO: 1221 - RNA, 20 nt, synthetic construct
  source 1..20: mol_type = other RNA
accacaagccaacgccaatg

SEQ ID NO: 1222 - RNA, 20 nt, synthetic construct
  source 1..20: mol_type = other RNA
gaccacaagccaacgccaat

SEQ ID NO: 1223 - RNA, 20 nt, synthetic construct
  source 1..20: mol_type = other RNA
ggaccacaagccaacgccaa

SEQ ID NO: 1224 - RNA, 20 nt, synthetic construct
  source 1..20: mol_type = other RNA
tggaccacaagccaacgcca

SEQ ID NO: 1225 - RNA, 20 nt, synthetic construct
  source 1..20: mol_type = other RNA
atggaccacaagccaacgcc

SEQ ID NO: 1226 - RNA, 20 nt, synthetic construct
  source 1..20: mol_type = other RNA
catggaccacaagccaacgc

SEQ ID NO: 1227 - RNA, 20 nt, synthetic construct
  source 1..20: mol_type = other RNA
acatggaccacaagccaacg

SEQ ID NO: 1228 - RNA, 20 nt, synthetic construct
  source 1..20: mol_type = other RNA
cacatggaccacaagccaac

SEQ ID NO: 1229 - RNA, 20 nt, synthetic construct
  source 1..20: mol_type = other RNA
gcacatggaccacaagccaa

SEQ ID NO: 1230 - RNA, 20 nt, synthetic construct
  source 1..20: mol_type = other RNA
tgcacatggaccacaagcca

SEQ ID NO: 1231 - RNA, 20 nt, synthetic construct
  source 1..20: mol_type = other RNA
ctgcacatggaccacaagcc

SEQ ID NO: 1232 - RNA, 20 nt, synthetic construct
  source 1..20: mol_type = other RNA
tctgcacatggaccacaagc

SEQ ID NO: 1233 - RNA, 20 nt, synthetic construct
  source 1..20: mol_type = other RNA
gttctgcacatggaccacaa

SEQ ID NO: 1234 - RNA, 20 nt, synthetic construct
  source 1..20: mol_type = other RNA
ggttctgcacatggaccaca

SEQ ID NO: 1235 - RNA, 20 nt, synthetic construct
  source 1..20: mol_type = other RNA
gttggttctgcacatggacc

SEQ ID NO: 1236 - RNA, 20 nt, synthetic construct
  source 1..20: mol_type = other RNA
ctgttggttctgcacatgga

SEQ ID NO: 1237 - RNA, 20 nt, synthetic construct
  source 1..20: mol_type = other RNA
tctgttggttctgcacatgg

SEQ ID NO: 1238 - RNA, 20 nt, synthetic construct
  source 1..20: mol_type = other RNA
gcctctgttggttctgcaca

SEQ ID NO: 1239 - RNA, 20 nt, synthetic construct
  source 1..20: mol_type = other RNA
tgcctctgttggttctgcac

SEQ ID NO: 1240 - RNA, 20 nt, synthetic construct
  source 1..20: mol_type = other RNA
gtgcctctgttggttctgca

SEQ ID NO: 1241 - RNA, 20 nt, synthetic construct
  source 1..20: mol_type = other RNA
agtgcctctgttggttctgc

SEQ ID NO: 1242 - RNA, 20 nt, synthetic construct
  source 1..20: mol_type = other RNA
accacaccatgctgcgtcct

SEQ ID NO: 1243 - RNA, 20 nt, synthetic construct
  source 1..20: mol_type = other RNA
ttgctggcgaagagagaggc

SEQ ID NO: 1244 - RNA, 20 nt, synthetic construct
  source 1..20: mol_type = other RNA
gttgctggcgaagagagagg

SEQ ID NO: 1245 - RNA, 20 nt, synthetic construct
  source 1..20: mol_type = other RNA
tgttgctggcgaagagagag

SEQ ID NO: 1246 - RNA, 20 nt, synthetic construct
  source 1..20: mol_type = other RNA
atgttgctggcgaagagaga

SEQ ID NO: 1247 - RNA, 20 nt, synthetic construct
  source 1..20: mol_type = other RNA
gatgttgctggcgaagagag

SEQ ID NO: 1248 - RNA, 20 nt, synthetic construct
  source 1..20: mol_type = other RNA
gccgatgttgctggcgaaga

SEQ ID NO: 1249 - RNA, 20 nt, synthetic construct
  source 1..20: mol_type = other RNA
tgccgatgttgctggcgaag

SEQ ID NO: 1250 - RNA, 20 nt, synthetic construct
  source 1..20: mol_type = other RNA
ctgccgatgttgctggcgaa

SEQ ID NO: 1251 - RNA, 20 nt, synthetic construct
  source 1..20: mol_type = other RNA
aagccacttgcagcgccagt

SEQ ID NO: 1252 - RNA, 20 nt, synthetic construct
  source 1..20: mol_type = other RNA
tccagcaacagccaagccac

SEQ ID NO: 1253 - RNA, 20 nt, synthetic construct
  source 1..20: mol_type = other RNA
cgaatccagcaacagccaag

SEQ ID NO: 1254 - RNA, 20 nt, synthetic construct
  source 1..20: mol_type = other RNA
ctcgaatccagcaacagcca

SEQ ID NO: 1255 - RNA, 20 nt, synthetic construct
  source 1..20: mol_type = other RNA
actcgaatccagcaacagcc

SEQ ID NO: 1256 - RNA, 20 nt, synthetic construct
  source 1..20: mol_type = other RNA
cactcgaatccagcaacagc

SEQ ID NO: 1257 - RNA, 20 nt, synthetic construct
  source 1..20: mol_type = other RNA
ttccactcgaatccagcaac

SEQ ID NO: 1258 - RNA, 20 nt, synthetic construct
  source 1..20: mol_type = other RNA
aagagcgcattccactcgaa

SEQ ID NO: 1259 - RNA, 20 nt, synthetic construct
  source 1..20: mol_type = other RNA
gaagagcgcattccactcga

SEQ ID NO: 1260 - RNA, 20 nt, synthetic construct
  source 1..20: mol_type = other RNA
cgaagagcgcattccactcg

SEQ ID NO: 1261 - RNA, 20 nt, synthetic construct
  source 1..20: mol_type = other RNA
acgaagagcgcattccactc

SEQ ID NO: 1262 - RNA, 20 nt, synthetic construct
  source 1..20: mol_type = other RNA
cacgaagagcgcattccact

SEQ ID NO: 1263 - RNA, 20 nt, synthetic construct
  source 1..20: mol_type = other RNA
ccacgaagagcgcattccac

SEQ ID NO: 1264 - RNA, 20 nt, synthetic construct
  source 1..20: mol_type = other RNA
accacgaagagcgcattcca

SEQ ID NO: 1265 - RNA, 20 nt, synthetic construct
  source 1..20: mol_type = other RNA
caccacgaagagcgcattcc

SEQ ID NO: 1266 - RNA, 20 nt, synthetic construct
  source 1..20: mol_type = other RNA
gcaccacgaagagcgcattc

SEQ ID NO: 1267 - RNA, 20 nt, synthetic construct
  source 1..20: mol_type = other RNA
agcaccacgaagagcgcatt

SEQ ID NO: 1268 - RNA, 20 nt, synthetic construct
  source 1..20: mol_type = other RNA
cagcaccacgaagagcgcat

SEQ ID NO: 1269 - RNA, 20 nt, synthetic construct
  source 1..20: mol_type = other RNA
tagcagcaccacgaagagcg

SEQ ID NO: 1270 - RNA, 20 nt, synthetic construct
  source 1..20: mol_type = other RNA
gtagcagcaccacgaagagc

SEQ ID NO: 1271 - RNA, 20 nt, synthetic construct
  source 1..20: mol_type = other RNA
agtagcagcaccacgaagag

SEQ ID NO: 1272 - RNA, 20 nt, synthetic construct
  source 1..20: mol_type = other RNA
cagtagcagcaccacgaaga

SEQ ID NO: 1273 - RNA, 20 nt, synthetic construct
  source 1..20: mol_type = other RNA
ccagtagcagcaccacgaag

SEQ ID NO: 1274 - RNA, 20 nt, synthetic construct
  source 1..20: mol_type = other RNA
cccagtagcagcaccacgaa

SEQ ID NO: 1275 - RNA, 20 nt, synthetic construct
  source 1..20: mol_type = other RNA
gcaaacagccagcccagtag

SEQ ID NO: 1276 - RNA, 20 nt, synthetic construct
  source 1..20: mol_type = other RNA
tgcaaacagccagcccagta

SEQ ID NO: 1277 - RNA, 20 nt, synthetic construct
  source 1..20: mol_type = other RNA
gtgcaaacagccagcccagt

SEQ ID NO: 1278 - RNA, 20 nt, synthetic construct
  source 1..20: mol_type = other RNA
acacgggtgcaaacagccag

SEQ ID NO: 1279 - RNA, 20 nt, synthetic construct
  source 1..20: mol_type = other RNA
tacacgggtgcaaacagcca

SEQ ID NO: 1280 - RNA, 20 nt, synthetic construct
  source 1..20: mol_type = other RNA
gtacacgggtgcaaacagcc

SEQ ID NO: 1281 - RNA, 20 nt, synthetic construct
  source 1..20: mol_type = other RNA
ggtacacgggtgcaaacagc

SEQ ID NO: 1282 - RNA, 20 nt, synthetic construct
  source 1..20: mol_type = other RNA
aggtacacgggtgcaaacag

SEQ ID NO: 1283 - RNA, 20 nt, synthetic construct
  source 1..20: mol_type = other RNA
caggtacacgggtgcaaaca

SEQ ID NO: 1284 - RNA, 20 nt, synthetic construct
  source 1..20: mol_type = other RNA
tcaggtacacgggtgcaaac

SEQ ID NO: 1285 - RNA, 20 nt, synthetic construct
  source 1..20: mol_type = other RNA
gtcaggtacacgggtgcaaa

SEQ ID NO: 1286 - RNA, 20 nt, synthetic construct
  source 1..20: mol_type = other RNA
tgtcaggtacacgggtgcaa

SEQ ID NO: 1287 - RNA, 20 nt, synthetic construct
  source 1..20: mol_type = other RNA
ctgtcaggtacacgggtgca

SEQ ID NO: 1288 - RNA, 20 nt, synthetic construct
  source 1..20: mol_type = other RNA
ctgtggcatcgtgatgaccc

SEQ ID NO: 1289 - RNA, 20 nt, synthetic construct
  source 1..20: mol_type = other RNA
actgtggcatcgtgatgacc

SEQ ID NO: 1290 - RNA, 20 nt, synthetic construct
  source 1..20: mol_type = other RNA
tactgtggcatcgtgatgac

SEQ ID NO: 1291 - RNA, 20 nt, synthetic construct
  source 1..20: mol_type = other RNA
gtactgtggcatcgtgatga

SEQ ID NO: 1292 - RNA, 20 nt, synthetic construct
  source 1..20: mol_type = other RNA
ggtactgtggcatcgtgatg

SEQ ID NO: 1293 - RNA, 20 nt, synthetic construct
  source 1..20: mol_type = other RNA
aggtactgtggcatcgtgat

SEQ ID NO: 1294 - RNA, 20 nt, synthetic construct
  source 1..20: mol_type = other RNA
caggtactgtggcatcgtga

SEQ ID NO: 1295 - RNA, 20 nt, synthetic construct
  source 1..20: mol_type = other RNA
cgcaggtactgtggcatcgt

SEQ ID NO: 1296 - RNA, 20 nt, synthetic construct
  source 1..20: mol_type = other RNA
agacaggtagaggcggatgc

SEQ ID NO: 1297 - RNA, 20 nt, synthetic construct
  source 1..20: mol_type = other RNA
cagacaggtagaggcggatg

SEQ ID NO: 1298 - RNA, 20 nt, synthetic construct
  source 1..20: mol_type = other RNA
acagacaggtagaggcggat

SEQ ID NO: 1299 - RNA, 20 nt, synthetic construct
  source 1..20: mol_type = other RNA
cacagacaggtagaggcgga

SEQ ID NO: 1300 - RNA, 20 nt, synthetic construct
  source 1..20: mol_type = other RNA
gagcacagacaggtagaggc

SEQ ID NO: 1301 - RNA, 20 nt, synthetic construct
  source 1..20: mol_type = other RNA
gagagcacagacaggtagag

SEQ ID NO: 1302 - RNA, 20 nt, synthetic construct
  source 1..20: mol_type = other RNA
ggagagcacagacaggtaga

SEQ ID NO: 1303 - RNA, 20 nt, synthetic construct
  source 1..20: mol_type = other RNA
aagggagagcacagacaggt

SEQ ID NO: 1304 - RNA, 20 nt, synthetic construct
  source 1..20: mol_type = other RNA
ctggatgaatacagctccgg

SEQ ID NO: 1305 - RNA, 20 nt, synthetic construct
  source 1..20: mol_type = other RNA
gagcctgctggatgaataca

SEQ ID NO: 1306 - RNA, 20 nt, synthetic construct
  source 1..20: mol_type = other RNA
cagagcctgctggatgaata

SEQ ID NO: 1307 - RNA, 20 nt, synthetic construct
  source 1..20: mol_type = other RNA
gatgttccagcccagagcct

SEQ ID NO: 1308 - RNA, 20 nt, synthetic construct
  source 1..20: mol_type = other RNA
atagatgttccagcccagag

SEQ ID NO: 1309 - RNA, 20 nt, synthetic construct
  source 1..20: mol_type = other RNA
catagatgttccagcccaga

SEQ ID NO: 1310 - RNA, 20 nt, synthetic construct
  source 1..20: mol_type = other RNA
gcatagatgttccagcccag

SEQ ID NO: 1311 - RNA, 20 nt, synthetic construct
  source 1..20: mol_type = other RNA
ggcatagatgttccagccca

SEQ ID NO: 1312 - RNA, 20 nt, synthetic construct
  source 1..20: mol_type = other RNA
aggcatagatgttccagccc

SEQ ID NO: 1313 - RNA, 20 nt, synthetic construct
  source 1..20: mol_type = other RNA
gaggcatagatgttccagcc

SEQ ID NO: 1314 - RNA, 20 nt, synthetic construct
  source 1..20: mol_type = other RNA
ggaggcatagatgttccagc

SEQ ID NO: 1315 - RNA, 20 nt, synthetic construct
  source 1..20: mol_type = other RNA
cggaggcatagatgttccag

SEQ ID NO: 1316 - RNA, 20 nt, synthetic construct
  source 1..20: mol_type = other RNA
acggaggcatagatgttcca

SEQ ID NO: 1317 - RNA, 20 nt, synthetic construct
  source 1..20: mol_type = other RNA
gacggaggcatagatgttcc

SEQ ID NO: 1318 - RNA, 20 nt, synthetic construct
  source 1..20: mol_type = other RNA
tgacggaggcatagatgttc

SEQ ID NO: 1319 - RNA, 20 nt, synthetic construct
  source 1..20: mol_type = other RNA
atgacggaggcatagatgtt

SEQ ID NO: 1320 - RNA, 20 nt, synthetic construct
  source 1..20: mol_type = other RNA
gatgacggaggcatagatgt

SEQ ID NO: 1321 - RNA, 20 nt, synthetic construct
  source 1..20: mol_type = other RNA
cgatgacggaggcatagatg

SEQ ID NO: 1322 - RNA, 20 nt, synthetic construct
  source 1..20: mol_type = other RNA
gcgatgacggaggcatagat

SEQ ID NO: 1323 - RNA, 20 nt, synthetic construct
  source 1..20: mol_type = other RNA
cgcgatgacggaggcataga

SEQ ID NO: 1324 - RNA, 20 nt, synthetic construct
  source 1..20: mol_type = other RNA
agcgcgatgacggaggcata

SEQ ID NO: 1325 - RNA, 20 nt, synthetic construct
  source 1..20: mol_type = other RNA
aagcgcgatgacggaggcat

SEQ ID NO: 1326 - RNA, 20 nt, synthetic construct
  source 1..20: mol_type = other RNA
atgcccagaagcgcgatgac

SEQ ID NO: 1327 - RNA, 20 nt, synthetic construct
  source 1..20: mol_type = other RNA
gatgcccagaagcgcgatga

SEQ ID NO: 1328 - RNA, 20 nt, synthetic construct
  source 1..20: mol_type = other RNA
tgatgcccagaagcgcgatg

SEQ ID NO: 1329 - RNA, 20 nt, synthetic construct
  source 1..20: mol_type = other RNA
catggtgatgcccagaagcg

SEQ ID NO: 1330 - RNA, 20 nt, synthetic construct
  source 1..20: mol_type = other RNA
gtcaccgtgtaaatcatggt

SEQ ID NO: 1331 - RNA, 20 nt, synthetic construct
  source 1..20: mol_type = other RNA
tgtcaccgtgtaaatcatgg

SEQ ID NO: 1332 - RNA, 20 nt, synthetic construct
  source 1..20: mol_type = other RNA
ctgtcaccgtgtaaatcatg

SEQ ID NO: 1333 - RNA, 20 nt, synthetic construct
  source 1..20: mol_type = other RNA
cctgtcaccgtgtaaatcat

SEQ ID NO: 1334 - RNA, 20 nt, synthetic construct
  source 1..20: mol_type = other RNA
ctcctgtcaccgtgtaaatc

SEQ ID NO: 1335 - RNA, 20 nt, synthetic construct
  source 1..20: mol_type = other RNA
cctcctgtcaccgtgtaaat

SEQ ID NO: 1336 - RNA, 20 nt, synthetic construct
  source 1..20: mol_type = other RNA
ccctcctgtcaccgtgtaaa

SEQ ID NO: 1337 - RNA, 20 nt, synthetic construct
  source 1..20: mol_type = other RNA
gccctcctgtcaccgtgtaa

SEQ ID NO: 1338 - RNA, 20 nt, synthetic construct
  source 1..20: mol_type = other RNA
agccctcctgtcaccgtgta

SEQ ID NO: 1339 - RNA, 20 nt, synthetic construct
  source 1..20: mol_type = other RNA
gtctgtaccgtgtccgtgta

SEQ ID NO: 1340 - RNA, 20 nt, synthetic construct
  source 1..20: mol_type = other RNA
ggtctgtaccgtgtccgtgt

SEQ ID NO: 1341 - RNA, 20 nt, synthetic construct
  source 1..20: mol_type = other RNA
aggtctgtaccgtgtccgtg

SEQ ID NO: 1342 - RNA, 20 nt, synthetic construct
  source 1..20: mol_type = other RNA
aaggtctgtaccgtgtccgt

SEQ ID NO: 1343 - RNA, 20 nt, synthetic construct
  source 1..20: mol_type = other RNA
gaaggtctgtaccgtgtccg

SEQ ID NO: 1344 - RNA, 20 nt, synthetic construct
  source 1..20: mol_type = other RNA
acgaaggtctgtaccgtgtc

SEQ ID NO: 1345 - RNA, 20 nt, synthetic construct
  source 1..20: mol_type = other RNA
gacgaaggtctgtaccgtgt

SEQ ID NO: 1346 - RNA, 20 nt, synthetic construct
  source 1..20: mol_type = other RNA
atgacgaaggtctgtaccgt

SEQ ID NO: 1347 - RNA, 20 nt, synthetic construct
  source 1..20: mol_type = other RNA
aatgacgaaggtctgtaccg

SEQ ID NO: 1348 - RNA, 20 nt, synthetic construct
  source 1..20: mol_type = other RNA
gaatgacgaaggtctgtacc

SEQ ID NO: 1349 - RNA, 20 nt, synthetic construct
  source 1..20: mol_type = other RNA
agaatgacgaaggtctgtac

SEQ ID NO: 1350 - RNA, 20 nt, synthetic construct
  source 1..20: mol_type = other RNA
taacccatgaggatgcaggc

SEQ ID NO: 1351 - RNA, 20 nt, synthetic construct
  source 1..20: mol_type = other RNA
cgtaacccatgaggatgcag

SEQ ID NO: 1352 - RNA, 20 nt, synthetic construct
  source 1..20: mol_type = other RNA
gcgtaacccatgaggatgca

SEQ ID NO: 1353 - RNA, 20 nt, synthetic construct
  source 1..20: mol_type = other RNA
aggcgtaacccatgaggatg

SEQ ID NO: 1354 - RNA, 20 nt, synthetic construct
  source 1..20: mol_type = other RNA
aaggcgtaacccatgaggat

SEQ ID NO: 1355 - RNA, 20 nt, synthetic construct
  source 1..20: mol_type = other RNA
gaaggcgtaacccatgagga

SEQ ID NO: 1356 - RNA, 20 nt, synthetic construct
  source 1..20: mol_type = other RNA
ggaaggcgtaacccatgagg

SEQ ID NO: 1357 - RNA, 20 nt, synthetic construct
  source 1..20: mol_type = other RNA
tggaaggcgtaacccatgag

SEQ ID NO: 1358 - RNA, 20 nt, synthetic construct
  source 1..20: mol_type = other RNA
gtggaaggcgtaacccatga

SEQ ID NO: 1359 - RNA, 20 nt, synthetic construct
  source 1..20: mol_type = other RNA
cgtggaaggcgtaacccatg

SEQ ID NO: 1360 - RNA, 20 nt, synthetic construct
  source 1..20: mol_type = other RNA
tcgtggaaggcgtaacccat

SEQ ID NO: 1361 - RNA, 20 nt, synthetic construct
  source 1..20: mol_type = other RNA
ctcgtggaaggcgtaaccca

SEQ ID NO: 1362 - RNA, 20 nt, synthetic construct
  source 1..20: mol_type = other RNA
acctcgtggaaggcgtaacc

SEQ ID NO: 1363 - RNA, 20 nt, synthetic construct
  source 1..20: mol_type = other RNA
cacctcgtggaaggcgtaac

SEQ ID NO: 1364 - RNA, 20 nt, synthetic construct
  source 1..20: mol_type = other RNA
gaagagacccgaatacccgc

SEQ ID NO: 1365 - RNA, 20 nt, synthetic construct
  source 1..20: mol_type = other RNA
cgaagagacccgaatacccg

SEQ ID NO: 1366 - RNA, 20 nt, synthetic construct
  source 1..20: mol_type = other RNA
tcgaagagacccgaataccc

SEQ ID NO: 1367 - RNA, 20 nt, synthetic construct
  source 1..20: mol_type = other RNA
gtcgaagagacccgaatacc

SEQ ID NO: 1368 - RNA, 20 nt, synthetic construct
  source 1..20: mol_type = other RNA
tgtcgaagagacccgaatac

SEQ ID NO: 1369 - RNA, 20 nt, synthetic construct
  source 1..20: mol_type = other RNA
ttgtcgaagagacccgaata

SEQ ID NO: 1370 - RNA, 20 nt, synthetic construct
  source 1..20: mol_type = other RNA
tttgtcgaagagacccgaat

SEQ ID NO: 1371 - RNA, 20 nt, synthetic construct
  source 1..20: mol_type = other RNA
atttgtcgaagagacccgaa

SEQ ID NO: 1372 - RNA, 20 nt, synthetic construct
  source 1..20: mol_type = other RNA
tatttgtcgaagagacccga

SEQ ID NO: 1373 - RNA, 20 nt, synthetic construct
  source 1..20: mol_type = other RNA
gtatttgtcgaagagacccg

SEQ ID NO: 1374 - RNA, 20 nt, synthetic construct
  source 1..20: mol_type = other RNA
ggtatttgtcgaagagaccc

SEQ ID NO: 1375 - RNA, 20 nt, synthetic construct
  source 1..20: mol_type = other RNA
cccaggtatttgtcgaagag

SEQ ID NO: 1376 - RNA, 20 nt, synthetic construct
  source 1..20: mol_type = other RNA
tcccaggtatttgtcgaaga

SEQ ID NO: 1377 - RNA, 20 nt, synthetic construct
  source 1..20: mol_type = other RNA
ctcccaggtatttgtcgaag

SEQ ID NO: 1378 - RNA, 20 nt, synthetic construct
  source 1..20: mol_type = other RNA
gctcccaggtatttgtcgaa

SEQ ID NO: 1379 - RNA, 20 nt, synthetic construct
  source 1..20: mol_type = other RNA
tgctcccaggtatttgtcga

SEQ ID NO: 1380 - RNA, 20 nt, synthetic construct
  source 1..20: mol_type = other RNA
ctgctcccaggtatttgtcg

SEQ ID NO: 1381 - RNA, 20 nt, synthetic construct
  source 1..20: mol_type = other RNA
tcgctgctcccaggtatttg

SEQ ID NO: 1382 - RNA, 20 nt, synthetic construct
  source 1..20: mol_type = other RNA
gtcgctgctcccaggtattt

SEQ ID NO: 1383 - RNA, 20 nt, synthetic construct
  source 1..20: mol_type = other RNA
agtcgctgctcccaggtatt

SEQ ID NO: 1384 - RNA, 20 nt, synthetic construct
  source 1..20: mol_type = other RNA
aagtcgctgctcccaggtat

SEQ ID NO: 1385 - RNA, 20 nt, synthetic construct
  source 1..20: mol_type = other RNA
gaagtcgctgctcccaggta

SEQ ID NO: 1386 - RNA, 20 nt, synthetic construct
  source 1..20: mol_type = other RNA
tcggacaccgtcagcgaagt

SEQ ID NO: 1387 - RNA, 20 nt, synthetic construct
  source 1..20: mol_type = other RNA
atgtttcccacggctggatc

SEQ ID NO: 1388 - RNA, 20 nt, synthetic construct
  source 1..20: mol_type = other RNA
gatgtttcccacggctggat

SEQ ID NO: 1389 - RNA, 20 nt, synthetic construct
  source 1..20: mol_type = other RNA
agatgtttcccacggctgga

SEQ ID NO: 1390 - RNA, 20 nt, synthetic construct
  source 1..20: mol_type = other RNA
gagatgtttcccacggctgg

SEQ ID NO: 1391 - RNA, 20 nt, synthetic construct
  source 1..20: mol_type = other RNA
ggagatgtttcccacggctg

SEQ ID NO: 1392 - RNA, 20 nt, synthetic construct
  source 1..20: mol_type = other RNA
tggagatgtttcccacggct

SEQ ID NO: 1393 - RNA, 20 nt, synthetic construct
  source 1..20: mol_type = other RNA
agaagctggagatgtttccc

SEQ ID NO: 1394 - RNA, 20 nt, synthetic construct
  source 1..20: mol_type = other RNA
cgatagcagaagctggagat

SEQ ID NO: 1395 - RNA, 20 nt, synthetic construct
  source 1..20: mol_type = other RNA
tcgatagcagaagctggaga

SEQ ID NO: 1396 - RNA, 20 nt, synthetic construct
  source 1..20: mol_type = other RNA
gtcgatagcagaagctggag

SEQ ID NO: 1397 - RNA, 20 nt, synthetic construct
  source 1..20: mol_type = other RNA
ggtcgatagcagaagctgga

SEQ ID NO: 1398 - RNA, 20 nt, synthetic construct
  source 1..20: mol_type = other RNA
gggtcgatagcagaagctgg

SEQ ID NO: 1399 - RNA, 20 nt, synthetic construct
  source 1..20: mol_type = other RNA
ttgtgagtccgaggagcagc

SEQ ID NO: 1400 - RNA, 20 nt, synthetic construct
  source 1..20: mol_type = other RNA
attgtgagtccgaggagcag

SEQ ID NO: 1401 - RNA, 20 nt, synthetic construct
  source 1..20: mol_type = other RNA
gattgtgagtccgaggagca

SEQ ID NO: 1402 - RNA, 20 nt, synthetic construct
  source 1..20: mol_type = other RNA
cgattgtgagtccgaggagc

SEQ ID NO: 1403 - RNA, 20 nt, synthetic construct
  source 1..20: mol_type = other RNA
gacgattgtgagtccgagga

SEQ ID NO: 1404 - RNA, 20 nt, synthetic construct
  source 1..20: mol_type = other RNA
agacgattgtgagtccgagg

SEQ ID NO: 1405 - RNA, 20 nt, synthetic construct
  source 1..20: mol_type = other RNA
gagacgattgtgagtccgag

SEQ ID NO: 1406 - RNA, 20 nt, synthetic construct
  source 1..20: mol_type = other RNA
cgagacgattgtgagtccga

SEQ ID NO: 1407 - RNA, 20 nt, synthetic construct
  source 1..20: mol_type = other RNA
ccgagacgattgtgagtccg

SEQ ID NO: 1408 - RNA, 20 nt, synthetic construct
  source 1..20: mol_type = other RNA
cccgagacgattgtgagtcc

SEQ ID NO: 1409 - RNA, 20 nt, synthetic construct
  source 1..20: mol_type = other RNA
gcccgagacgattgtgagtc

SEQ ID NO: 1410 - RNA, 20 nt, synthetic construct
  source 1..20: mol_type = other RNA
agcccgagacgattgtgagt

SEQ ID NO: 1411 - RNA, 20 nt, synthetic construct
  source 1..20: mol_type = other RNA
cagcccgagacgattgtgag

SEQ ID NO: 1412 - RNA, 20 nt, synthetic construct
  source 1..20: mol_type = other RNA
ccagcccgagacgattgtga

SEQ ID NO: 1413 - RNA, 20 nt, synthetic construct
  source 1..20: mol_type = other RNA
accagcccgagacgattgtg

SEQ ID NO: 1414 - RNA, 20 nt, synthetic construct
  source 1..20: mol_type = other RNA
taccagcccgagacgattgt

SEQ ID NO: 1415 - RNA, 20 nt, synthetic construct
  source 1..20: mol_type = other RNA
gtaccagcccgagacgattg

SEQ ID NO: 1416 - RNA, 20 nt, synthetic construct
  source 1..20: mol_type = other RNA
agtaccagcccgagacgatt

SEQ ID NO: 1417 - RNA, 20 nt, synthetic construct
  source 1..20: mol_type = other RNA
cagtaccagcccgagacgat

SEQ ID NO: 1418 - RNA, 20 nt, synthetic construct
  source 1..20: mol_type = other RNA
acgatgacctggtcgctgca

SEQ ID NO: 1419 - RNA, 20 nt, synthetic construct
  source 1..20: mol_type = other RNA
tgcacgatgacctggtcgct

SEQ ID NO: 1420 - RNA, 20 nt, synthetic construct
  source 1..20: mol_type = other RNA
tgatgtgggtcaggctcttc

SEQ ID NO: 1421 - RNA, 20 nt, synthetic construct
  source 1..20: mol_type = other RNA
ttgatgtgggtcaggctctt

SEQ ID NO: 1422 - RNA, 20 nt, synthetic construct
  source 1..20: mol_type = other RNA
cttgatgtgggtcaggctct

SEQ ID NO: 1423 - RNA, 20 nt, synthetic construct
  source 1..20: mol_type = other RNA
ccttgatgtgggtcaggctc

SEQ ID NO: 1424 - RNA, 20 nt, synthetic construct
  source 1..20: mol_type = other RNA
tgggcgtcagcttcaggtac

SEQ ID NO: 1425 - RNA, 20 nt, synthetic construct
  source 1..20: mol_type = other RNA
atgggcgtcagcttcaggta

SEQ ID NO: 1426 - RNA, 20 nt, synthetic construct
  source 1..20: mol_type = other RNA
catgggcgtcagcttcaggt

SEQ ID NO: 1427 - RNA, 20 nt, synthetic construct
  source 1..20: mol_type = other RNA
acatgggcgtcagcttcagg

SEQ ID NO: 1428 - RNA, 20 nt, synthetic construct
  source 1..20: mol_type = other RNA
aacatgggcgtcagcttcag

SEQ ID NO: 1429 - RNA, 20 nt, synthetic construct
  source 1..20: mol_type = other RNA
aaacatgggcgtcagcttca

SEQ ID NO: 1430 - RNA, 20 nt, synthetic construct
  source 1..20: mol_type = other RNA
gaaacatgggcgtcagcttc

SEQ ID NO: 1431 - RNA, 20 nt, synthetic construct
  source 1..20: mol_type = other RNA
agaaacatgggcgtcagctt

SEQ ID NO: 1432 - RNA, 20 nt, synthetic construct
  source 1..20: mol_type = other RNA
gagaaacatgggcgtcagct

SEQ ID NO: 1433 - RNA, 20 nt, synthetic construct
  source 1..20: mol_type = other RNA
tgagaaacatgggcgtcagc

SEQ ID NO: 1434 - RNA, 20 nt, synthetic construct
  source 1..20: mol_type = other RNA
atgagaaacatgggcgtcag

SEQ ID NO: 1435 - RNA, 20 nt, synthetic construct
  source 1..20: mol_type = other RNA
ggcatgaccatgagaaacat

SEQ ID NO: 1436 - RNA, 20 nt, synthetic construct
  source 1..20: mol_type = other RNA
tggcatgaccatgagaaaca

SEQ ID NO: 1437 - RNA, 20 nt, synthetic construct
  source 1..20: mol_type = other RNA
ctggcatgaccatgagaaac

SEQ ID NO: 1438 - RNA, 20 nt, synthetic construct
  source 1..20: mol_type = other RNA
cctggcatgaccatgagaaa

SEQ ID NO: 1439 - RNA, 20 nt, synthetic construct
  source 1..20: mol_type = other RNA
gcctggcatgaccatgagaa

SEQ ID NO: 1440 - RNA, 20 nt, synthetic construct
  source 1..20: mol_type = other RNA
tgcctggcatgaccatgaga

SEQ ID NO: 1441 - RNA, 20 nt, synthetic construct
  source 1..20: mol_type = other RNA
atgagcttcacgacgagccg

SEQ ID NO: 1442 - RNA, 20 nt, synthetic construct
  source 1..20: mol_type = other RNA
catgagcttcacgacgagcc

SEQ ID NO: 1443 - RNA, 20 nt, synthetic construct
  source 1..20: mol_type = other RNA
gcatgagcttcacgacgagc

SEQ ID NO: 1444 - RNA, 20 nt, synthetic construct
  source 1..20: mol_type = other RNA
ggcatgagcttcacgacgag

SEQ ID NO: 1445 - RNA, 20 nt, synthetic construct
  source 1..20: mol_type = other RNA
gggcatgagcttcacgacga

SEQ ID NO: 1446 - RNA, 20 nt, synthetic construct
  source 1..20: mol_type = other RNA
tgggcatgagcttcacgacg

SEQ ID NO: 1447 - RNA, 20 nt, synthetic construct
  source 1..20: mol_type = other RNA
ttgggcatgagcttcacgac

SEQ ID NO: 1448 - RNA, 20 nt, synthetic construct
  source 1..20: mol_type = other RNA
gttgggcatgagcttcacga

SEQ ID NO: 1449 - RNA, 20 nt, synthetic construct
  source 1..20: mol_type = other RNA
cgttgggcatgagcttcacg

SEQ ID NO: 1450 - RNA, 20 nt, synthetic construct
  source 1..20: mol_type = other RNA
ccgttgggcatgagcttcac

SEQ ID NO: 1451 - RNA, 20 nt, synthetic construct
  source 1..20: mol_type = other RNA
accgttgggcatgagcttca

SEQ ID NO: 1452 - RNA, 20 nt, synthetic construct
  source 1..20: mol_type = other RNA
gaccgttgggcatgagcttc

SEQ ID NO: 1453 - RNA, 20 nt, synthetic construct
  source 1..20: mol_type = other RNA
agaccgttgggcatgagctt

SEQ ID NO: 1454 - RNA, 20 nt, synthetic construct
  source 1..20: mol_type = other RNA
cagaccgttgggcatgagct

SEQ ID NO: 1455 - RNA, 20 nt, synthetic construct
  source 1..20: mol_type = other RNA
atgaccgccagcatgagtcc

SEQ ID NO: 1456 - RNA, 20 nt, synthetic construct
  source 1..20: mol_type = other RNA
atggaggccagcgaggacat

SEQ ID NO: 1457 - RNA, 20 nt, synthetic construct
  source 1..20: mol_type = other RNA
aagatggaggccagcgagga

SEQ ID NO: 1458 - RNA, 20 nt, synthetic construct
  source 1..20: mol_type = other RNA
gttgaagatggaggccagcg

SEQ ID NO: 1459 - RNA, 20 nt, synthetic construct
  source 1..20: mol_type = other RNA
tgttgaagatggaggccagc

SEQ ID NO: 1460 - RNA, 20 nt, synthetic construct
  source 1..20: mol_type = other RNA
ctgttgaagatggaggccag

SEQ ID NO: 1461 - RNA, 20 nt, synthetic construct
  source 1..20: mol_type = other RNA
agagcgtgctgctgctgttg

SEQ ID NO: 1462 - RNA, 20 nt, synthetic construct
  source 1..20: mol_type = other RNA
aagagcgtgctgctgctgtt

SEQ ID NO: 1463 - RNA, 20 nt, synthetic construct
  source 1..20: mol_type = other RNA
gaagagcgtgctgctgctgt

SEQ ID NO: 1464 - RNA, 20 nt, synthetic construct
  source 1..20: mol_type = other RNA
gtgaagagcgtgctgctgct

SEQ ID NO: 1465 - RNA, 20 nt, synthetic construct
  source 1..20: mol_type = other RNA
catggtgaagagcgtgctgc

SEQ ID NO: 1466 - RNA, 20 nt, synthetic construct
  source 1..20: mol_type = other RNA
aagccaggccaccgacacta

SEQ ID NO: 1467 - RNA, 20 nt, synthetic construct
  source 1..20: mol_type = other RNA
tgtaatcgaagagctgcccg

SEQ ID NO: 1468 - RNA, 20 nt, synthetic construct
  source 1..20: mol_type = other RNA
atgtaatcgaagagctgccc

SEQ ID NO: 1469 - RNA, 20 nt, synthetic construct
  source 1..20: mol_type = other RNA
gatgtaatcgaagagctgcc

SEQ ID NO: 1470 - RNA, 20 nt, synthetic construct
  source 1..20: mol_type = other RNA
ggatgtaatcgaagagctgc

SEQ ID NO: 1471 - RNA, 20 nt, synthetic construct
  source 1..20: mol_type = other RNA
cctggatgtaatcgaagagc

SEQ ID NO: 1472 - RNA, 20 nt, synthetic construct
  source 1..20: mol_type = other RNA
tgcctggatgtaatcgaaga

SEQ ID NO: 1473 - RNA, 20 nt, synthetic construct
  source 1..20: mol_type = other RNA
ctgcctggatgtaatcgaag

SEQ ID NO: 1474 - RNA, 20 nt, synthetic construct
  source 1..20: mol_type = other RNA
agactgcctggatgtaatcg

SEQ ID NO: 1475 - RNA, 20 nt, synthetic construct
  source 1..20: mol_type = other RNA
gagactgcctggatgtaatc

SEQ ID NO: 1476 - RNA, 20 nt, synthetic construct
  source 1..20: mol_type = other RNA
agctagagactgcctggatg

SEQ ID NO: 1477 - RNA, 20 nt, synthetic construct
  source 1..20: mol_type = other RNA
aagagcgccagcacgaagac

SEQ ID NO: 1478 - RNA, 20 nt, synthetic construct
  source 1..20: mol_type = other RNA
gaagagcgccagcacgaaga

SEQ ID NO: 1479 - RNA, 20 nt, synthetic construct
  source 1..20: mol_type = other RNA
acgaagagcgccagcacgaa

SEQ ID NO: 1480 - RNA, 20 nt, synthetic construct
  source 1..20: mol_type = other RNA
aactcgggaatcaggcgtgc

SEQ ID NO: 1481 - RNA, 20 nt, synthetic construct
  source 1..20: mol_type = other RNA
gaactcgggaatcaggcgtg

SEQ ID NO: 1482 - RNA, 20 nt, synthetic construct
  source 1..20: mol_type = other RNA
agaactcgggaatcaggcgt

SEQ ID NO: 1483 - RNA, 20 nt, synthetic construct
  source 1..20: mol_type = other RNA
gagaactcgggaatcaggcg

SEQ ID NO: 1484 - RNA, 20 nt, synthetic construct
  source 1..20: mol_type = other RNA
ggagaactcgggaatcaggc

SEQ ID NO: 1485 - RNA, 20 nt, synthetic construct
  source 1..20: mol_type = other RNA
aggagaactcgggaatcagg

SEQ ID NO: 1486 - RNA, 20 nt, synthetic construct
  source 1..20: mol_type = other RNA
aaggagaactcgggaatcag

SEQ ID NO: 1487 - RNA, 20 nt, synthetic construct
  source 1..20: mol_type = other RNA
gaaggagaactcgggaatca

SEQ ID NO: 1488 - RNA, 20 nt, synthetic construct
  source 1..20: mol_type = other RNA
cgaaggagaactcgggaatc

SEQ ID NO: 1489 - RNA, 20 nt, synthetic construct
  source 1..20: mol_type = other RNA
tggcgaagtagaggtagtgc

SEQ ID NO: 1490 - RNA, 20 nt, synthetic construct
  source 1..20: mol_type = other RNA
atggcgaagtagaggtagtg

SEQ ID NO: 1491 - RNA, 20 nt, synthetic construct
  source 1..20: mol_type = other RNA
aatggcgaagtagaggtagt

SEQ ID NO: 1492 - RNA, 20 nt, synthetic construct
  source 1..20: mol_type = other RNA
caatggcgaagtagaggtag

SEQ ID NO: 1493 - RNA, 20 nt, synthetic construct
  source 1..20: mol_type = other RNA
acaatggcgaagtagaggta

SEQ ID NO: 1494 - RNA, 20 nt, synthetic construct
  source 1..20: mol_type = other RNA
cacaatggcgaagtagaggt

SEQ ID NO: 1495 - RNA, 20 nt, synthetic construct
  source 1..20: mol_type = other RNA
gcacaatggcgaagtagagg

SEQ ID NO: 1496 - RNA, 20 nt, synthetic construct
  source 1..20: mol_type = other RNA
agcacaatggcgaagtagag

SEQ ID NO: 1497 - RNA, 20 nt, synthetic construct
  source 1..20: mol_type = other RNA
cagcacaatggcgaagtaga

SEQ ID NO: 1498 - RNA, 20 nt, synthetic construct
  source 1..20: mol_type = other RNA
acagcacaatggcgaagtag

SEQ ID NO: 1499 - RNA, 20 nt, synthetic construct
  source 1..20: mol_type = other RNA
aacagcacaatggcgaagta

SEQ ID NO: 1500 - RNA, 20 nt, synthetic construct
  source 1..20: mol_type = other RNA
gaacagcacaatggcgaagt

SEQ ID NO: 1501 - RNA, 20 nt, synthetic construct
  source 1..20: mol_type = other RNA
agaacagcacaatggcgaag

SEQ ID NO: 1502 - RNA, 20 nt, synthetic construct
  source 1..20: mol_type = other RNA
aagaacagcacaatggcgaa

SEQ ID NO: 1503 - RNA, 20 nt, synthetic construct
  source 1..20: mol_type = other RNA
gaagaacagcacaatggcga

SEQ ID NO: 1504 - RNA, 20 nt, synthetic construct
  source 1..20: mol_type = other RNA
agaagaacagcacaatggcg

SEQ ID NO: 1505 - RNA, 20 nt, synthetic construct
  source 1..20: mol_type = other RNA
cagaagaacagcacaatggc

SEQ ID NO: 1506 - RNA, 20 nt, synthetic construct
  source 1..20: mol_type = other RNA
agcagaagaacagcacaatg

SEQ ID NO: 1507 - RNA, 20 nt, synthetic construct
  source 1..20: mol_type = other RNA
ccagagcagaagaacagcac

SEQ ID NO: 1508 - RNA, 20 nt, synthetic construct
  source 1..20: mol_type = other RNA
aggcggtggaggtgctttct

SEQ ID NO: 1509 - RNA, 20 nt, synthetic construct
  source 1..20: mol_type = other RNA
actgaagaccaggcggtgga

SEQ ID NO: 1510 - RNA, 20 nt, synthetic construct
  source 1..20: mol_type = other RNA
gagactgaagaccaggcggt

SEQ ID NO: 1511 - RNA, 20 nt, synthetic construct
  source 1..20: mol_type = other RNA
tgccggagactgaagaccag

SEQ ID NO: 1512 - RNA, 20 nt, synthetic construct
  source 1..20: mol_type = other RNA
atgccggagactgaagacca

SEQ ID NO: 1513 - RNA, 20 nt, synthetic construct
  source 1..20: mol_type = other RNA
tatgccggagactgaagacc

SEQ ID NO: 1514 - RNA, 20 nt, synthetic construct
  source 1..20: mol_type = other RNA
ctatgccggagactgaagac

SEQ ID NO: 1515 - RNA, 20 nt, synthetic construct
  source 1..20: mol_type = other RNA
gctatgccggagactgaaga

SEQ ID NO: 1516 - RNA, 20 nt, synthetic construct
  source 1..20: mol_type = other RNA
tgctatgccggagactgaag

SEQ ID NO: 1517 - RNA, 20 nt, synthetic construct
  source 1..20: mol_type = other RNA
ttgctatgccggagactgaa

SEQ ID NO: 1518 - RNA, 20 nt, synthetic construct
  source 1..20: mol_type = other RNA
cttgctatgccggagactga

SEQ ID NO: 1519 - RNA, 20 nt, synthetic construct
  source 1..20: mol_type = other RNA
ccttgctatgccggagactg

SEQ ID NO: 1520 - RNA, 20 nt, synthetic construct
  source 1..20: mol_type = other RNA
tccttgctatgccggagact

SEQ ID NO: 1521 - RNA, 20 nt, synthetic construct
  source 1..20: mol_type = other RNA
gttcctccttgctatgccgg

SEQ ID NO: 1522 - RNA, 20 nt, synthetic construct
  source 1..20: mol_type = other RNA
cgttcctccttgctatgccg

SEQ ID NO: 1523 - RNA, 20 nt, synthetic construct
  source 1..20: mol_type = other RNA
tcccgttcctccttgctatg

SEQ ID NO: 1524 - RNA, 20 nt, synthetic construct
  source 1..20: mol_type = other RNA
ctcccgttcctccttgctat

SEQ ID NO: 1525 - RNA, 20 nt, synthetic construct
  source 1..20: mol_type = other RNA
cctcccgttcctccttgcta

SEQ ID NO: 1526 - RNA, 20 nt, synthetic construct
  source 1..20: mol_type = other RNA
aggtcctcccgttcctcctt

SEQ ID NO: 1527 - RNA, 20 nt, synthetic construct
  source 1..20: mol_type = other RNA
atccaggtcctcccgttcct

SEQ ID NO: 1528 - RNA, 20 nt, synthetic construct
  source 1..20: mol_type = other RNA
agcatccaggtcctcccgtt

SEQ ID NO: 1529 - RNA, 20 nt, synthetic construct
  source 1..20: mol_type = other RNA
atcagcatccaggtcctccc

SEQ ID NO: 1530 - RNA, 20 nt, synthetic construct
  source 1..20: mol_type = other RNA
gagtgaggagccttgctgct

SEQ ID NO: 1531 - RNA, 20 nt, synthetic construct
  source 1..20: mol_type = other RNA
acagggagtgaggagccttg

SEQ ID NO: 1532 - RNA, 20 nt, synthetic construct
  source 1..20: mol_type = other RNA
tacagggagtgaggagcctt

SEQ ID NO: 1533 - RNA, 20 nt, synthetic construct
  source 1..20: mol_type = other RNA
tctgggcacccattctgtac

SEQ ID NO: 1534 - RNA, 20 nt, synthetic construct
  source 1..20: mol_type = other RNA
ctctgggcacccattctgta

SEQ ID NO: 1535 - RNA, 20 nt, synthetic construct
  source 1..20: mol_type = other RNA
gcactctctgggcacccatt

SEQ ID NO: 1536 - RNA, 20 nt, synthetic construct
  source 1..20: mol_type = other RNA
actggcggaagaggcttggt

SEQ ID NO: 1537 - RNA, 20 nt, synthetic construct
  source 1..20: mol_type = other RNA
cacaaaaccagagcaggcac

SEQ ID NO: 1538 - RNA, 20 nt, synthetic construct
  source 1..20: mol_type = other RNA
attccacaaaaccagagcag

SEQ ID NO: 1539 - RNA, 20 nt, synthetic construct
  source 1..20: mol_type = other RNA
gctcattccacaaaaccaga

SEQ ID NO: 1540 - RNA, 20 nt, synthetic construct
  source 1..20: mol_type = other RNA
tgctcattccacaaaaccag

SEQ ID NO: 1541 - RNA, 20 nt, synthetic construct
  source 1..20: mol_type = other RNA
tctgctcattccacaaaacc

SEQ ID NO: 1542 - RNA, 20 nt, synthetic construct
  source 1..20: mol_type = other RNA
ctctgctcattccacaaaac

SEQ ID NO: 1543 - RNA, 20 nt, synthetic construct
  source 1..20: mol_type = other RNA
gaacacggccactgccatca

SEQ ID NO: 1544 - RNA, 20 nt, synthetic construct
  source 1..20: mol_type = other RNA
aggaacacggccactgccat

SEQ ID NO: 1545 - RNA, 20 nt, synthetic construct
  source 1..20: mol_type = other RNA
agttggtcttaggcatagaa

SEQ ID NO: 1546 - RNA, 20 nt, synthetic construct
  source 1..20: mol_type = other RNA
gcagttggtcttaggcatag

SEQ ID NO: 1547 - RNA, 20 nt, synthetic construct
  source 1..20: mol_type = other RNA
cgcagttggtcttaggcata

SEQ ID NO: 1548 - RNA, 20 nt, synthetic construct
  source 1..20: mol_type = other RNA
acgcagttggtcttaggcat

SEQ ID NO: 1549 - RNA, 20 nt, synthetic construct
  source 1..20: mol_type = other RNA
aacgcagttggtcttaggca

SEQ ID NO: 1550 - RNA, 20 nt, synthetic construct
  source 1..20: mol_type = other RNA
ttatggtgtccaacgcagtt

SEQ ID NO: 1551 - RNA, 20 nt, synthetic construct
  source 1..20: mol_type = other RNA
cttatggtgtccaacgcagt

SEQ ID NO: 1552 - RNA, 20 nt, synthetic construct
  source 1..20: mol_type = other RNA
gcttatggtgtccaacgcag

SEQ ID NO: 1553 - RNA, 20 nt, synthetic construct
  source 1..20: mol_type = other RNA
ggcttatggtgtccaacgca

SEQ ID NO: 1554 - RNA, 20 nt, synthetic construct
  source 1..20: mol_type = other RNA
tggcttatggtgtccaacgc

SEQ ID NO: 1555 - RNA, 20 nt, synthetic construct
  source 1..20: mol_type = other RNA
gtggcttatggtgtccaacg

SEQ ID NO: 1556 - RNA, 20 nt, synthetic construct
  source 1..20: mol_type = other RNA
tgtggcttatggtgtccaac

SEQ ID NO: 1557 - RNA, 20 nt, synthetic construct
  source 1..20: mol_type = other RNA
ctgtggcttatggtgtccaa

SEQ ID NO: 1558 - RNA, 20 nt, synthetic construct
  source 1..20: mol_type = other RNA
gctgtggcttatggtgtcca

SEQ ID NO: 1559 - RNA, 20 nt, synthetic construct
  source 1..20: mol_type = other RNA
ggctgtggcttatggtgtcc

SEQ ID NO: 1560 - RNA, 20 nt, synthetic construct
  source 1..20: mol_type = other RNA
gaggctgtggcttatggtgt

SEQ ID NO: 1561 - RNA, 20 nt, synthetic construct
  source 1..20: mol_type = other RNA
tgaggctgtggcttatggtg

SEQ ID NO: 1562 - RNA, 20 nt, synthetic construct
  source 1..20: mol_type = other RNA
gtgaggctgtggcttatggt

SEQ ID NO: 1563 - RNA, 20 nt, synthetic construct
  source 1..20: mol_type = other RNA
cccacttcctgtgaggctgt

SEQ ID NO: 1564 - RNA, 20 nt, synthetic construct
  source 1..20: mol_type = other RNA
ccaatcagatgcagtgggcc

SEQ ID NO: 1565 - RNA, 20 nt, synthetic construct
  source 1..20: mol_type = other RNA
gccaatcagatgcagtgggc

SEQ ID NO: 1566 - RNA, 20 nt, synthetic construct
  source 1..20: mol_type = other RNA
aagtgactgccaatcagatg

SEQ ID NO: 1567 - RNA, 20 nt, synthetic construct
  source 1..20: mol_type = other RNA
gaagtgactgccaatcagat

SEQ ID NO: 1568 - RNA, 20 nt, synthetic construct
  source 1..20: mol_type = other RNA
gccctcatgggaagtgactg

SEQ ID NO: 1569 - RNA, 20 nt, synthetic construct
  source 1..20: mol_type = other RNA
ggccctcatgggaagtgact

SEQ ID NO: 1570 - RNA, 19 nt, synthetic construct
  source 1..19: mol_type = other RNA
aatcctgctgacatcctag

SEQ ID NO: 1571 - RNA, 19 nt, synthetic construct
  source 1..19: mol_type = other RNA
ctaggatgtcagcaggatt

SEQ ID NO: 1572 - RNA, 19 nt, synthetic construct
  source 1..19: mol_type = other RNA
atcctgctgacatcctagt

SEQ ID NO: 1573 - RNA, 19 nt, synthetic construct
  source 1..19: mol_type = other RNA
actaggatgtcagcaggat

SEQ ID NO: 1574 - RNA, 19 nt, synthetic construct
  source 1..19: mol_type = other RNA
tcctgctgacatcctagtc

SEQ ID NO: 1575 - RNA, 19 nt, synthetic construct
  source 1..19: mol_type = other RNA
gactaggatgtcagcagga

SEQ ID NO: 1576 - RNA, 19 nt, synthetic construct
  source 1..19: mol_type = other RNA
tcctagtcattgctgcata

SEQ ID NO: 1577 - RNA, 19 nt, synthetic construct
  source 1..19: mol_type = other RNA
tatgcagcaatgactagga

SEQ ID NO: 1578 - RNA, 19 nt, synthetic construct
  source 1..19: mol_type = other RNA
cctagtcattgctgcatat

SEQ ID NO: 1579 - RNA, 19 nt, synthetic construct
  source 1..19: mol_type = other RNA
atatgcagcaatgactagg

SEQ ID NO: 1580 - RNA, 19 nt, synthetic construct
  source 1..19: mol_type = other RNA
agtcattgctgcatatttc

SEQ ID NO: 1581 - RNA, 19 nt, synthetic construct
  source 1..19: mol_type = other RNA
gaaatatgcagcaatgact

SEQ ID NO: 1582 - RNA, 19 nt, synthetic construct
  source 1..19: mol_type = other RNA
gtcattgctgcatatttcc

SEQ ID NO: 1583 - RNA, 19 nt, synthetic construct
  source 1..19: mol_type = other RNA
ggaaatatgcagcaatgac

SEQ ID NO: 1584 - RNA, 19 nt, synthetic construct
  source 1..19: mol_type = other RNA
gcatatttcctgctggtca

SEQ ID NO: 1585 - RNA, 19 nt, synthetic construct
  source 1..19: mol_type = other RNA
tgaccagcaggaaatatgc

SEQ ID NO: 1586 - RNA, 19 nt, synthetic construct
  source 1..19: mol_type = other RNA
catatttcctgctggtcat

SEQ ID NO: 1587 - RNA, 19 nt, synthetic construct
  source 1..19: mol_type = other RNA
atgaccagcaggaaatatg

SEQ ID NO: 1588 - RNA, 19 nt, synthetic construct
  source 1..19: mol_type = other RNA
atatttcctgctggtcatt

SEQ ID NO: 1589 - RNA, 19 nt, synthetic construct
  source 1..19: mol_type = other RNA
aatgaccagcaggaaatat

SEQ ID NO: 1590 - RNA, 19 nt, synthetic construct
  source 1..19: mol_type = other RNA
tatttcctgctggtcattg

SEQ ID NO: 1591 - RNA, 19 nt, synthetic construct
  source 1..19: mol_type = other RNA
caatgaccagcaggaaata

SEQ ID NO: 1592 - RNA, 19 nt, synthetic construct
  source 1..19: mol_type = other RNA
atttcctgctggtcattgg

SEQ ID NO: 1593 - RNA, 19 nt, synthetic construct
  source 1..19: mol_type = other RNA
ccaatgaccagcaggaaat

SEQ ID NO: 1594 - RNA, 19 nt, synthetic construct
  source 1..19: mol_type = other RNA
tttcctgctggtcattggc

SEQ ID NO: 1595 - RNA, 19 nt, synthetic construct
  source 1..19: mol_type = other RNA
gccaatgaccagcaggaaa

SEQ ID NO: 1596 - RNA, 19 nt, synthetic construct
  source 1..19: mol_type = other RNA
ttcctgctggtcattggcg

SEQ ID NO: 1597 - RNA, 19 nt, synthetic construct
  source 1..19: mol_type = other RNA
cgccaatgaccagcaggaa

SEQ ID NO: 1598 - RNA, 19 nt, synthetic construct
  source 1..19: mol_type = other RNA
tcctgctggtcattggcgt

SEQ ID NO: 1599 - RNA, 19 nt, synthetic construct
  source 1..19: mol_type = other RNA
acgccaatgaccagcagga

SEQ ID NO: 1600 - RNA, 19 nt, synthetic construct
  source 1..19: mol_type = other RNA
cctgctggtcattggcgtt

SEQ ID NO: 1601 - RNA, 19 nt, synthetic construct
  source 1..19: mol_type = other RNA
aacgccaatgaccagcagg

SEQ ID NO: 1602 - RNA, 19 nt, synthetic construct
  source 1..19: mol_type = other RNA
ctgctggtcattggcgttg

SEQ ID NO: 1603 - RNA, 19 nt, synthetic construct
  source 1..19: mol_type = other RNA
caacgccaatgaccagcag

SEQ ID NO: 1604 - RNA, 19 nt, synthetic construct
  source 1..19: mol_type = other RNA
tgctggtcattggcgttgg

SEQ ID NO: 1605 - RNA, 19 nt, synthetic construct
  source 1..19: mol_type = other RNA
ccaacgccaatgaccagca

SEQ ID NO: 1606 - RNA, 19 nt, synthetic construct
  source 1..19: mol_type = other RNA
gctggtcattggcgttggc

SEQ ID NO: 1607 - RNA, 19 nt, synthetic construct
  source 1..19: mol_type = other RNA
gccaacgccaatgaccagc

SEQ ID NO: 1608 - RNA, 19 nt, synthetic construct
  source 1..19: mol_type = other RNA
ctggtcattggcgttggct

SEQ ID NO: 1609 - RNA, 19 nt, synthetic construct
  source 1..19: mol_type = other RNA
agccaacgccaatgaccag

SEQ ID NO: 1610 - RNA, 19 nt, synthetic construct
  source 1..19: mol_type = other RNA
tggtcattggcgttggctt

SEQ ID NO: 1611 - RNA, 19 nt, synthetic construct
  source 1..19: mol_type = other RNA
aagccaacgccaatgacca

SEQ ID NO: 1612 - RNA, 19 nt, synthetic construct
  source 1..19: mol_type = other RNA
ggtcattggcgttggcttg

SEQ ID NO: 1613 - RNA, 19 nt, synthetic construct
  source 1..19: mol_type = other RNA
caagccaacgccaatgacc

SEQ ID NO: 1614 - RNA, 19 nt, synthetic construct
  source 1..19: mol_type = other RNA
gtcattggcgttggcttgt

SEQ ID NO: 1615 - RNA, 19 nt, synthetic construct
  source 1..19: mol_type = other RNA
acaagccaacgccaatgac

SEQ ID NO: 1616 - RNA, 19 nt, synthetic construct
  source 1..19: mol_type = other RNA
tcattggcgttggcttgtg

SEQ ID NO: 1617 - RNA, 19 nt, synthetic construct
  source 1..19: mol_type = other RNA
cacaagccaacgccaatga

SEQ ID NO: 1618 - RNA, 19 nt, synthetic construct
  source 1..19: mol_type = other RNA
cattggcgttggcttgtgg

SEQ ID NO: 1619 - RNA, 19 nt, synthetic construct
  source 1..19: mol_type = other RNA
ccacaagccaacgccaatg

SEQ ID NO: 1620 - RNA, 19 nt, synthetic construct
  source 1..19: mol_type = other RNA
ggcgttggcttgtggtcca

SEQ ID NO: 1621 - RNA, 19 nt, synthetic construct
  source 1..19: mol_type = other RNA
tggaccacaagccaacgcc

SEQ ID NO: 1622 - RNA, 19 nt, synthetic construct
  source 1..19: mol_type = other RNA
gcgttggcttgtggtccat

SEQ ID NO: 1623 - RNA, 19 nt, synthetic construct
  source 1..19: mol_type = other RNA
atggaccacaagccaacgc

SEQ ID NO: 1624 - RNA, 19 nt, synthetic construct
  source 1..19: mol_type = other RNA
tggcttgtggtccatgtgc

SEQ ID NO: 1625 - RNA, 19 nt, synthetic construct
  source 1..19: mol_type = other RNA
gcacatggaccacaagcca

SEQ ID NO: 1626 - RNA, 19 nt, synthetic construct
  source 1..19: mol_type = other RNA
ggcttgtggtccatgtgca

SEQ ID NO: 1627 - RNA, 19 nt, synthetic construct
  source 1..19: mol_type = other RNA
tgcacatggaccacaagcc

SEQ ID NO: 1628 - RNA, 19 nt, synthetic construct
  source 1..19: mol_type = other RNA
tggcaggacgcagcatggt

SEQ ID NO: 1629 - RNA, 19 nt, synthetic construct
  source 1..19: mol_type = other RNA
accatgctgcgtcctgcca

SEQ ID NO: 1630 - RNA, 19 nt, synthetic construct
  source 1..19: mol_type = other RNA
gcaggacgcagcatggtgt

SEQ ID NO: 1631 - RNA, 19 nt, synthetic construct
  source 1..19: mol_type = other RNA
acaccatgctgcgtcctgc

SEQ ID NO: 1632 - RNA, 19 nt, synthetic construct
  source 1..19: mol_type = other RNA
caggacgcagcatggtgtg

SEQ ID NO: 1633 - RNA, 19 nt, synthetic construct
  source 1..19: mol_type = other RNA
cacaccatgctgcgtcctg

SEQ ID NO: 1634 - RNA, 19 nt, synthetic construct
  source 1..19: mol_type = other RNA
aggacgcagcatggtgtgg

SEQ ID NO: 1635 - RNA, 19 nt, synthetic construct
  source 1..19: mol_type = other RNA
ccacaccatgctgcgtcct

SEQ ID NO: 1636 - RNA, 19 nt, synthetic construct
  source 1..19: mol_type = other RNA
cctctctcttcgccagcaa

SEQ ID NO: 1637 - RNA, 19 nt, synthetic construct
  source 1..19: mol_type = other RNA
ttgctggcgaagagagagg

SEQ ID NO: 1638 - RNA, 19 nt, synthetic construct
  source 1..19: mol_type = other RNA
ctctctcttcgccagcaac

SEQ ID NO: 1639 - RNA, 19 nt, synthetic construct
  source 1..19: mol_type = other RNA
gttgctggcgaagagagag

SEQ ID NO: 1640 - RNA, 19 nt, synthetic construct
  source 1..19: mol_type = other RNA
cactttgtgggcctggcag

SEQ ID NO: 1641 - RNA, 19 nt, synthetic construct
  source 1..19: mol_type = other RNA
ctgccaggcccacaaagtg

SEQ ID NO: 1642 - RNA, 19 nt, synthetic construct
  source 1..19: mol_type = other RNA
actttgtgggcctggcagg

SEQ ID NO: 1643 - RNA, 19 nt, synthetic construct
  source 1..19: mol_type = other RNA
cctgccaggcccacaaagt

SEQ ID NO: 1644 - RNA, 19 nt, synthetic construct
  source 1..19: mol_type = other RNA
tttgtgggcctggcaggga

SEQ ID NO: 1645 - RNA, 19 nt, synthetic construct
  source 1..19: mol_type = other RNA
tccctgccaggcccacaaa

SEQ ID NO: 1646 - RNA, 19 nt, synthetic construct
  source 1..19: mol_type = other RNA
agggactggcgctgcaagt

SEQ ID NO: 1647 - RNA, 19 nt, synthetic construct
  source 1..19: mol_type = other RNA
acttgcagcgccagtccct

SEQ ID NO: 1648 - RNA, 19 nt, synthetic construct
  source 1..19: mol_type = other RNA
aagtggcttggctgttgct

SEQ ID NO: 1649 - RNA, 19 nt, synthetic construct
  source 1..19: mol_type = other RNA
agcaacagccaagccactt

SEQ ID NO: 1650 - RNA, 19 nt, synthetic construct
  source 1..19: mol_type = other RNA
agtggcttggctgttgctg

SEQ ID NO: 1651 - RNA, 19 nt, synthetic construct
  source 1..19: mol_type = other RNA
cagcaacagccaagccact

SEQ ID NO: 1652 - RNA, 19 nt, synthetic construct
  source 1..19: mol_type = other RNA
ttggctgttgctggattcg

SEQ ID NO: 1653 - RNA, 19 nt, synthetic construct
  source 1..19: mol_type = other RNA
cgaatccagcaacagccaa

SEQ ID NO: 1654 - RNA, 19 nt, synthetic construct
  source 1..19: mol_type = other RNA
tggctgttgctggattcga

SEQ ID NO: 1655 - RNA, 19 nt, synthetic construct
  source 1..19: mol_type = other RNA
tcgaatccagcaacagcca

SEQ ID NO: 1656 - RNA, 19 nt, synthetic construct
  source 1..19: mol_type = other RNA
ggctgttgctggattcgag

SEQ ID NO: 1657 - RNA, 19 nt, synthetic construct
  source 1..19: mol_type = other RNA
ctcgaatccagcaacagcc

SEQ ID NO: 1658 - RNA, 19 nt, synthetic construct
  source 1..19: mol_type = other RNA
gctgttgctggattcgagt

SEQ ID NO: 1659 - RNA, 19 nt, synthetic construct
  source 1..19: mol_type = other RNA
actcgaatccagcaacagc

SEQ ID NO: 1660 - RNA, 19 nt, synthetic construct
  source 1..19: mol_type = other RNA
ctgttgctggattcgagtg

SEQ ID NO: 1661 - RNA, 19 nt, synthetic construct
  source 1..19: mol_type = other RNA
cactcgaatccagcaacag

SEQ ID NO: 1662 - RNA, 19 nt, synthetic construct
  source 1..19: mol_type = other RNA
tgttgctggattcgagtgg

SEQ ID NO: 1663 - RNA, 19 nt, synthetic construct
  source 1..19: mol_type = other RNA
ccactcgaatccagcaaca

SEQ ID NO: 1664 - RNA, 19 nt, synthetic construct
  source 1..19: mol_type = other RNA
gttgctggattcgagtgga

SEQ ID NO: 1665 - RNA, 19 nt, synthetic construct
  source 1..19: mol_type = other RNA
tccactcgaatccagcaac

SEQ ID NO: 1666 - RNA, 19 nt, synthetic construct
  source 1..19: mol_type = other RNA
ttgctggattcgagtggaa

SEQ ID NO: 1667 - RNA, 19 nt, synthetic construct
  source 1..19: mol_type = other RNA
ttccactcgaatccagcaa

SEQ ID NO: 1668 - RNA, 19 nt, synthetic construct
  source 1..19: mol_type = other RNA
cgagtggaatgcgctcttc

SEQ ID NO: 1669 - RNA, 19 nt, synthetic construct
  source 1..19: mol_type = other RNA
gaagagcgcattccactcg

SEQ ID NO: 1670 - RNA, 19 nt, synthetic construct
  source 1..19: mol_type = other RNA
gagtggaatgcgctcttcg

SEQ ID NO: 1671 - RNA, 19 nt, synthetic construct
  source 1..19: mol_type = other RNA
cgaagagcgcattccactc

SEQ ID NO: 1672 - RNA, 19 nt, synthetic construct
  source 1..19: mol_type = other RNA
agtggaatgcgctcttcgt

SEQ ID NO: 1673 - RNA, 19 nt, synthetic construct
  source 1..19: mol_type = other RNA
acgaagagcgcattccact

SEQ ID NO: 1674 - RNA, 19 nt, synthetic construct
  source 1..19: mol_type = other RNA
gtggaatgcgctcttcgtg

SEQ ID NO: 1675 - RNA, 19 nt, synthetic construct
  source 1..19: mol_type = other RNA
cacgaagagcgcattccac

SEQ ID NO: 1676 - RNA, 19 nt, synthetic construct
  source 1..19: mol_type = other RNA
tggaatgcgctcttcgtgg

SEQ ID NO: 1677 - RNA, 19 nt, synthetic construct
  source 1..19: mol_type = other RNA
ccacgaagagcgcattcca

SEQ ID NO: 1678 - RNA, 19 nt, synthetic construct
  source 1..19: mol_type = other RNA
ggaatgcgctcttcgtggt

SEQ ID NO: 1679 - RNA, 19 nt, synthetic construct
  source 1..19: mol_type = other RNA
accacgaagagcgcattcc

SEQ ID NO: 1680 - RNA, 19 nt, synthetic construct
  source 1..19: mol_type = other RNA
gaatgcgctcttcgtggtg

SEQ ID NO: 1681 - RNA, 19 nt, synthetic construct
  source 1..19: mol_type = other RNA
caccacgaagagcgcattc

SEQ ID NO: 1682 - RNA, 19 nt, synthetic construct
  source 1..19: mol_type = other RNA
tcttcgtggtgctgctact

SEQ ID NO: 1683 - RNA, 19 nt, synthetic construct
  source 1..19: mol_type = other RNA
agtagcagcaccacgaaga

SEQ ID NO: 1684 - RNA, 19 nt, synthetic construct
  source 1..19: mol_type = other RNA
gtggtgctgctactgggct

SEQ ID NO: 1685 - RNA, 19 nt, synthetic construct
  source 1..19: mol_type = other RNA
agcccagtagcagcaccac

SEQ ID NO: 1686 - RNA, 19 nt, synthetic construct
  source 1..19: mol_type = other RNA
tgctgctactgggctggct

SEQ ID NO: 1687 - RNA, 19 nt, synthetic construct
  source 1..19: mol_type = other RNA
agccagcccagtagcagca

SEQ ID NO: 1688 - RNA, 19 nt, synthetic construct
  source 1..19: mol_type = other RNA
gctactgggctggctgttt

SEQ ID NO: 1689 - RNA, 19 nt, synthetic construct
  source 1..19: mol_type = other RNA
aaacagccagcccagtagc

SEQ ID NO: 1690 - RNA, 19 nt, synthetic construct
  source 1..19: mol_type = other RNA
ctactgggctggctgtttg

SEQ ID NO: 1691 - RNA, 19 nt, synthetic construct
  source 1..19: mol_type = other RNA
caaacagccagcccagtag

SEQ ID NO: 1692 - RNA, 19 nt, synthetic construct
  source 1..19: mol_type = other RNA
tactgggctggctgtttgc

SEQ ID NO: 1693 - RNA, 19 nt, synthetic construct
  source 1..19: mol_type = other RNA
gcaaacagccagcccagta

SEQ ID NO: 1694 - RNA, 19 nt, synthetic construct
  source 1..19: mol_type = other RNA
actgggctggctgtttgca

SEQ ID NO: 1695 - RNA, 19 nt, synthetic construct
  source 1..19: mol_type = other RNA
tgcaaacagccagcccagt

SEQ ID NO: 1696 - RNA, 19 nt, synthetic construct
  source 1..19: mol_type = other RNA
gctggctgtttgcacccgt

SEQ ID NO: 1697 - RNA, 19 nt, synthetic construct
  source 1..19: mol_type = other RNA
acgggtgcaaacagccagc

SEQ ID NO: 1698 - RNA, 19 nt, synthetic construct
  source 1..19: mol_type = other RNA
ctggctgtttgcacccgtg

SEQ ID NO: 1699 - RNA, 19 nt, synthetic construct
  source 1..19: mol_type = other RNA
cacgggtgcaaacagccag

SEQ ID NO: 1700 - RNA, 19 nt, synthetic construct
  source 1..19: mol_type = other RNA
tggctgtttgcacccgtgt

SEQ ID NO: 1701 - RNA, 19 nt, synthetic construct
  source 1..19: mol_type = other RNA
acacgggtgcaaacagcca

SEQ ID NO: 1702 - RNA, 19 nt, synthetic construct
  source 1..19: mol_type = other RNA
ggctgtttgcacccgtgta

SEQ ID NO: 1703 - RNA, 19 nt, synthetic construct
  source 1..19: mol_type = other RNA
tacacgggtgcaaacagcc

SEQ ID NO: 1704 - RNA, 19 nt, synthetic construct
  source 1..19: mol_type = other RNA
gctgtttgcacccgtgtac

SEQ ID NO: 1705 - RNA, 19 nt, synthetic construct
  source 1..19: mol_type = other RNA
gtacacgggtgcaaacagc

SEQ ID NO: 1706 - RNA, 19 nt, synthetic construct
  source 1..19: mol_type = other RNA
ctgtttgcacccgtgtacc

SEQ ID NO: 1707 - RNA, 19 nt, synthetic construct
  source 1..19: mol_type = other RNA
ggtacacgggtgcaaacag

SEQ ID NO: 1708 - RNA, 19 nt, synthetic construct
  source 1..19: mol_type = other RNA
tgtttgcacccgtgtacct

SEQ ID NO: 1709 - RNA, 19 nt, synthetic construct
  source 1..19: mol_type = other RNA
aggtacacgggtgcaaaca

SEQ ID NO: 1710 - RNA, 19 nt, synthetic construct
  source 1..19: mol_type = other RNA
gtttgcacccgtgtacctg

SEQ ID NO: 1711 - RNA, 19 nt, synthetic construct
  source 1..19: mol_type = other RNA
caggtacacgggtgcaaac

SEQ ID NO: 1712 - RNA, 19 nt, synthetic construct
  source 1..19: mol_type = other RNA
tttgcacccgtgtacctga

SEQ ID NO: 1713 - RNA, 19 nt, synthetic construct
  source 1..19: mol_type = other RNA
tcaggtacacgggtgcaaa

SEQ ID NO: 1714 - RNA, 19 nt, synthetic construct
  source 1..19: mol_type = other RNA
ttgcacccgtgtacctgac

SEQ ID NO: 1715 - RNA, 19 nt, synthetic construct
  source 1..19: mol_type = other RNA
gtcaggtacacgggtgcaa

SEQ ID NO: 1716 - RNA, 19 nt, synthetic construct
  source 1..19: mol_type = other RNA
tgcacccgtgtacctgaca

SEQ ID NO: 1717 - RNA, 19 nt, synthetic construct
  source 1..19: mol_type = other RNA
tgtcaggtacacgggtgca

SEQ ID NO: 1718 - RNA, 19 nt, synthetic construct
  source 1..19: mol_type = other RNA
gcacccgtgtacctgacag

SEQ ID NO: 1719 - RNA, 19 nt, synthetic construct
  source 1..19: mol_type = other RNA
ctgtcaggtacacgggtgc

SEQ ID NO: 1720 - RNA, 19 nt, synthetic construct
  source 1..19: mol_type = other RNA
cacccgtgtacctgacagc

SEQ ID NO: 1721 - RNA, 19 nt, synthetic construct
  source 1..19: mol_type = other RNA
gctgtcaggtacacgggtg

SEQ ID NO: 1722 - RNA, 19 nt, synthetic construct
  source 1..19: mol_type = other RNA
acccgtgtacctgacagcg

SEQ ID NO: 1723 - RNA, 19 nt, synthetic construct
  source 1..19: mol_type = other RNA
cgctgtcaggtacacgggt

SEQ ID NO: 1724 - RNA, 19 nt, synthetic construct
  source 1..19: mol_type = other RNA
gggtcatcacgatgccaca

SEQ ID NO: 1725 - RNA, 19 nt, synthetic construct
  source 1..19: mol_type = other RNA
tgtggcatcgtgatgaccc

SEQ ID NO: 1726 - RNA, 19 nt, synthetic construct
  source 1..19: mol_type = other RNA
catcacgatgccacagtac

SEQ ID NO: 1727 - RNA, 19 nt, synthetic construct
  source 1..19: mol_type = other RNA
gtactgtggcatcgtgatg

SEQ ID NO: 1728 - RNA, 19 nt, synthetic construct
  source 1..19: mol_type = other RNA
atcacgatgccacagtacc

SEQ ID NO: 1729 - RNA, 19 nt, synthetic construct
  source 1..19: mol_type = other RNA
ggtactgtggcatcgtgat

SEQ ID NO: 1730 - RNA, 19 nt, synthetic construct
  source 1..19: mol_type = other RNA
tcacgatgccacagtacct

SEQ ID NO: 1731 - RNA, 19 nt, synthetic construct
  source 1..19: mol_type = other RNA
aggtactgtggcatcgtga

SEQ ID NO: 1732 - RNA, 19 nt, synthetic construct
  source 1..19: mol_type = other RNA
cacgatgccacagtacctg

SEQ ID NO: 1733 - RNA, 19 nt, synthetic construct
  source 1..19: mol_type = other RNA
caggtactgtggcatcgtg

SEQ ID NO: 1734 - RNA, 19 nt, synthetic construct
  source 1..19: mol_type = other RNA
acgatgccacagtacctgc

SEQ ID NO: 1735 - RNA, 19 nt, synthetic construct
  source 1..19: mol_type = other RNA
gcaggtactgtggcatcgt

SEQ ID NO: 1736 - RNA, 19 nt, synthetic construct
  source 1..19: mol_type = other RNA
cgatgccacagtacctgcg

SEQ ID NO: 1737 - RNA, 19 nt, synthetic construct
  source 1..19: mol_type = other RNA
cgcaggtactgtggcatcg

SEQ ID NO: 1738 - RNA, 19 nt, synthetic construct
  source 1..19: mol_type = other RNA
gatgccacagtacctgcgc

SEQ ID NO: 1739 - RNA, 19 nt, synthetic construct
  source 1..19: mol_type = other RNA
gcgcaggtactgtggcatc

SEQ ID NO: 1740 - RNA, 19 nt, synthetic construct
  source 1..19: mol_type = other RNA
ccacagtacctgcgcaagc

SEQ ID NO: 1741 - RNA, 19 nt, synthetic construct
  source 1..19: mol_type = other RNA
gcttgcgcaggtactgtgg

SEQ ID NO: 1742 - RNA, 19 nt, synthetic construct
  source 1..19: mol_type = other RNA
cacagtacctgcgcaagcg

SEQ ID NO: 1743 - RNA, 19 nt, synthetic construct
  source 1..19: mol_type = other RNA
cgcttgcgcaggtactgtg

SEQ ID NO: 1744 - RNA, 19 nt, synthetic construct
  source 1..19: mol_type = other RNA
acagtacctgcgcaagcgc

SEQ ID NO: 1745 - RNA, 19 nt, synthetic construct
  source 1..19: mol_type = other RNA
gcgcttgcgcaggtactgt

SEQ ID NO: 1746 - RNA, 19 nt, synthetic construct
  source 1..19: mol_type = other RNA
cagtacctgcgcaagcgct

SEQ ID NO: 1747 - RNA, 19 nt, synthetic construct
  source 1..19: mol_type = other RNA
agcgcttgcgcaggtactg

SEQ ID NO: 1748 - RNA, 19 nt, synthetic construct
  source 1..19: mol_type = other RNA
agtacctgcgcaagcgctt

SEQ ID NO: 1749 - RNA, 19 nt, synthetic construct
  source 1..19: mol_type = other RNA
aagcgcttgcgcaggtact

SEQ ID NO: 1750 - RNA, 19 nt, synthetic construct
  source 1..19: mol_type = other RNA
gtacctgcgcaagcgcttc

SEQ ID NO: 1751 - RNA, 19 nt, synthetic construct
  source 1..19: mol_type = other RNA
gaagcgcttgcgcaggtac

SEQ ID NO: 1752 - RNA, 19 nt, synthetic construct
  source 1..19: mol_type = other RNA
tacctgcgcaagcgcttcg

SEQ ID NO: 1753 - RNA, 19 nt, synthetic construct
  source 1..19: mol_type = other RNA
cgaagcgcttgcgcaggta

SEQ ID NO: 1754 - RNA, 19 nt, synthetic construct
  source 1..19: mol_type = other RNA
gcatccgcctctacctgtc

SEQ ID NO: 1755 - RNA, 19 nt, synthetic construct
  source 1..19: mol_type = other RNA
gacaggtagaggcggatgc

SEQ ID NO: 1756 - RNA, 19 nt, synthetic construct
  source 1..19: mol_type = other RNA
catccgcctctacctgtct

SEQ ID NO: 1757 - RNA, 19 nt, synthetic construct
  source 1..19: mol_type = other RNA
agacaggtagaggcggatg

SEQ ID NO: 1758 - RNA, 19 nt, synthetic construct
  source 1..19: mol_type = other RNA
atccgcctctacctgtctg

SEQ ID NO: 1759 - RNA, 19 nt, synthetic construct
  source 1..19: mol_type = other RNA
cagacaggtagaggcggat

SEQ ID NO: 1760 - RNA, 19 nt, synthetic construct
  source 1..19: mol_type = other RNA
tccgcctctacctgtctgt

SEQ ID NO: 1761 - RNA, 19 nt, synthetic construct
  source 1..19: mol_type = other RNA
acagacaggtagaggcgga

SEQ ID NO: 1762 - RNA, 19 nt, synthetic construct
  source 1..19: mol_type = other RNA
ccgcctctacctgtctgtg

SEQ ID NO: 1763 - RNA, 19 nt, synthetic construct
  source 1..19: mol_type = other RNA
cacagacaggtagaggcgg

SEQ ID NO: 1764 - RNA, 19 nt, synthetic construct
  source 1..19: mol_type = other RNA
cgcctctacctgtctgtgc

SEQ ID NO: 1765 - RNA, 19 nt, synthetic construct
  source 1..19: mol_type = other RNA
gcacagacaggtagaggcg

SEQ ID NO: 1766 - RNA, 19 nt, synthetic construct
  source 1..19: mol_type = other RNA
gcctctacctgtctgtgct

SEQ ID NO: 1767 - RNA, 19 nt, synthetic construct
  source 1..19: mol_type = other RNA
agcacagacaggtagaggc

SEQ ID NO: 1768 - RNA, 19 nt, synthetic construct
  source 1..19: mol_type = other RNA
ctgtctgtgctctcccttt

SEQ ID NO: 1769 - RNA, 19 nt, synthetic construct
  source 1..19: mol_type = other RNA
aaagggagagcacagacag

SEQ ID NO: 1770 - RNA, 19 nt, synthetic construct
  source 1..19: mol_type = other RNA
tgtctgtgctctccctttt

SEQ ID NO: 1771 - RNA, 19 nt, synthetic construct
  source 1..19: mol_type = other RNA
aaaagggagagcacagaca

SEQ ID NO: 1772 - RNA, 19 nt, synthetic construct
  source 1..19: mol_type = other RNA
tctgtgctctcccttttcc

SEQ ID NO: 1773 - RNA, 19 nt, synthetic construct
  source 1..19: mol_type = other RNA
ggaaaagggagagcacaga

SEQ ID NO: 1774 - RNA, 19 nt, synthetic construct
  source 1..19: mol_type = other RNA
gctctcccttttcctgtac

SEQ ID NO: 1775 - RNA, 19 nt, synthetic construct
  source 1..19: mol_type = other RNA
gtacaggaaaagggagagc

SEQ ID NO: 1776 - RNA, 19 nt, synthetic construct
  source 1..19: mol_type = other RNA
tcccttttcctgtacatct

SEQ ID NO: 1777 - RNA, 19 nt, synthetic construct
  source 1..19: mol_type = other RNA
agatgtacaggaaaaggga

SEQ ID NO: 1778 - RNA, 19 nt, synthetic construct
  source 1..19: mol_type = other RNA
cccttttcctgtacatctt

SEQ ID NO: 1779 - RNA, 19 nt, synthetic construct
  source 1..19: mol_type = other RNA
aagatgtacaggaaaaggg

SEQ ID NO: 1780 - RNA, 19 nt, synthetic construct
  source 1..19: mol_type = other RNA
ccttttcctgtacatcttc

SEQ ID NO: 1781 - RNA, 19 nt, synthetic construct
  source 1..19: mol_type = other RNA
gaagatgtacaggaaaagg

SEQ ID NO: 1782 - RNA, 19 nt, synthetic construct
  source 1..19: mol_type = other RNA
ttcctgtacatcttcacca

SEQ ID NO: 1783 - RNA, 19 nt, synthetic construct
  source 1..19: mol_type = other RNA
tggtgaagatgtacaggaa

SEQ ID NO: 1784 - RNA, 19 nt, synthetic construct
  source 1..19: mol_type = other RNA
tcctgtacatcttcaccaa

SEQ ID NO: 1785 - RNA, 19 nt, synthetic construct
  source 1..19: mol_type = other RNA
ttggtgaagatgtacagga

SEQ ID NO: 1786 - RNA, 19 nt, synthetic construct
  source 1..19: mol_type = other RNA
cctgtacatcttcaccaag

SEQ ID NO: 1787 - RNA, 19 nt, synthetic construct
  source 1..19: mol_type = other RNA
cttggtgaagatgtacagg

SEQ ID NO: 1788 - RNA, 19 nt, synthetic construct
  source 1..19: mol_type = other RNA
ttcaccaagatctcagtgg

SEQ ID NO: 1789 - RNA, 19 nt, synthetic construct
  source 1..19: mol_type = other RNA
ccactgagatcttggtgaa

SEQ ID NO: 1790 - RNA, 19 nt, synthetic construct
  source 1..19: mol_type = other RNA
tcaccaagatctcagtgga

SEQ ID NO: 1791 - RNA, 19 nt, synthetic construct
  source 1..19: mol_type = other RNA
tccactgagatcttggtga

SEQ ID NO: 1792 - RNA, 19 nt, synthetic construct
  source 1..19: mol_type = other RNA
caccaagatctcagtggac

SEQ ID NO: 1793 - RNA, 19 nt, synthetic construct
  source 1..19: mol_type = other RNA
gtccactgagatcttggtg

SEQ ID NO: 1794 - RNA, 19 nt, synthetic construct
  source 1..19: mol_type = other RNA
accaagatctcagtggaca

SEQ ID NO: 1795 - RNA, 19 nt, synthetic construct
  source 1..19: mol_type = other RNA
tgtccactgagatcttggt

SEQ ID NO: 1796 - RNA, 19 nt, synthetic construct
  source 1..19: mol_type = other RNA
ccaagatctcagtggacat

SEQ ID NO: 1797 - RNA, 19 nt, synthetic construct
  source 1..19: mol_type = other RNA
atgtccactgagatcttgg

SEQ ID NO: 1798 - RNA, 19 nt, synthetic construct
  source 1..19: mol_type = other RNA
caagatctcagtggacatg

SEQ ID NO: 1799 - RNA, 19 nt, synthetic construct
  source 1..19: mol_type = other RNA
catgtccactgagatcttg

SEQ ID NO: 1800 - RNA, 19 nt, synthetic construct
  source 1..19: mol_type = other RNA
aagatctcagtggacatgt

SEQ ID NO: 1801 - RNA, 19 nt, synthetic construct
  source 1..19: mol_type = other RNA
acatgtccactgagatctt

SEQ ID NO: 1802 - RNA, 19 nt, synthetic construct
  source 1..19: mol_type = other RNA
agatctcagtggacatgtt

SEQ ID NO: 1803 - RNA, 19 nt, synthetic construct
  source 1..19: mol_type = other RNA
aacatgtccactgagatct

SEQ ID NO: 1804 - RNA, 19 nt, synthetic construct
  source 1..19: mol_type = other RNA
gatctcagtggacatgttc

SEQ ID NO: 1805 - RNA, 19 nt, synthetic construct
  source 1..19: mol_type = other RNA
gaacatgtccactgagatc

SEQ ID NO: 1806 - RNA, 19 nt, synthetic construct
  source 1..19: mol_type = other RNA
atctcagtggacatgttct

SEQ ID NO: 1807 - RNA, 19 nt, synthetic construct
  source 1..19: mol_type = other RNA
agaacatgtccactgagat

SEQ ID NO: 1808 - RNA, 19 nt, synthetic construct
  source 1..19: mol_type = other RNA
gtggacatgttctccggag

SEQ ID NO: 1809 - RNA, 19 nt, synthetic construct
  source 1..19: mol_type = other RNA
ctccggagaacatgtccac

SEQ ID NO: 1810 - RNA, 19 nt, synthetic construct
  source 1..19: mol_type = other RNA
tggacatgttctccggagc

SEQ ID NO: 1811 - RNA, 19 nt, synthetic construct
  source 1..19: mol_type = other RNA
gctccggagaacatgtcca

SEQ ID NO: 1812 - RNA, 19 nt, synthetic construct
  source 1..19: mol_type = other RNA
ggacatgttctccggagct

SEQ ID NO: 1813 - RNA, 19 nt, synthetic construct
  source 1..19: mol_type = other RNA
agctccggagaacatgtcc

SEQ ID NO: 1814 - RNA, 19 nt, synthetic construct
  source 1..19: mol_type = other RNA
gacatgttctccggagctg

SEQ ID NO: 1815 - RNA, 19 nt, synthetic construct
  source 1..19: mol_type = other RNA
cagctccggagaacatgtc

SEQ ID NO: 1816 - RNA, 19 nt, synthetic construct
  source 1..19: mol_type = other RNA
acatgttctccggagctgt

SEQ ID NO: 1817 - RNA, 19 nt, synthetic construct
  source 1..19: mol_type = other RNA
acagctccggagaacatgt

SEQ ID NO: 1818 - RNA, 19 nt, synthetic construct
  source 1..19: mol_type = other RNA
catgttctccggagctgta

SEQ ID NO: 1819 - RNA, 19 nt, synthetic construct
  source 1..19: mol_type = other RNA
tacagctccggagaacatg

SEQ ID NO: 1820 - RNA, 19 nt, synthetic construct
  source 1..19: mol_type = other RNA
atgttctccggagctgtat

SEQ ID NO: 1821 - RNA, 19 nt, synthetic construct
  source 1..19: mol_type = other RNA
atacagctccggagaacat

SEQ ID NO: 1822 - RNA, 19 nt, synthetic construct
  source 1..19: mol_type = other RNA
tgttctccggagctgtatt

SEQ ID NO: 1823 - RNA, 19 nt, synthetic construct
  source 1..19: mol_type = other RNA
aatacagctccggagaaca

SEQ ID NO: 1824 - RNA, 19 nt, synthetic construct
  source 1..19: mol_type = other RNA
gttctccggagctgtattc

SEQ ID NO: 1825 - RNA, 19 nt, synthetic construct
  source 1..19: mol_type = other RNA
gaatacagctccggagaac

SEQ ID NO: 1826 - RNA, 19 nt, synthetic construct
  source 1..19: mol_type = other RNA
ttctccggagctgtattca

SEQ ID NO: 1827 - RNA, 19 nt, synthetic construct
  source 1..19: mol_type = other RNA
tgaatacagctccggagaa

SEQ ID NO: 1828 - RNA, 19 nt, synthetic construct
  source 1..19: mol_type = other RNA
tctccggagctgtattcat

SEQ ID NO: 1829 - RNA, 19 nt, synthetic construct
  source 1..19: mol_type = other RNA
atgaatacagctccggaga

SEQ ID NO: 1830 - RNA, 19 nt, synthetic construct
  source 1..19: mol_type = other RNA
ctccggagctgtattcatc

SEQ ID NO: 1831 - RNA, 19 nt, synthetic construct
  source 1..19: mol_type = other RNA
gatgaatacagctccggag

SEQ ID NO: 1832 - RNA, 19 nt, synthetic construct
  source 1..19: mol_type = other RNA
tccggagctgtattcatcc

SEQ ID NO: 1833 - RNA, 19 nt, synthetic construct
  source 1..19: mol_type = other RNA
ggatgaatacagctccgga

SEQ ID NO: 1834 - RNA, 19 nt, synthetic construct
  source 1..19: mol_type = other RNA
ccggagctgtattcatcca

SEQ ID NO: 1835 - RNA, 19 nt, synthetic construct
  source 1..19: mol_type = other RNA
tggatgaatacagctccgg

SEQ ID NO: 1836 - RNA, 19 nt, synthetic construct
  source 1..19: mol_type = other RNA
cggagctgtattcatccag

SEQ ID NO: 1837 - RNA, 19 nt, synthetic construct
  source 1..19: mol_type = other RNA
ctggatgaatacagctccg

SEQ ID NO: 1838 - RNA, 19 nt, synthetic construct
  source 1..19: mol_type = other RNA
gtattcatccagcaggctc

SEQ ID NO: 1839 - RNA, 19 nt, synthetic construct
  source 1..19: mol_type = other RNA
gagcctgctggatgaatac

SEQ ID NO: 1840 - RNA, 19 nt, synthetic construct
  source 1..19: mol_type = other RNA
tattcatccagcaggctct

SEQ ID NO: 1841 - RNA, 19 nt, synthetic construct
  source 1..19: mol_type = other RNA
agagcctgctggatgaata

SEQ ID NO: 1842 - RNA, 19 nt, synthetic construct
  source 1..19: mol_type = other RNA
attcatccagcaggctctg

SEQ ID NO: 1843 - RNA, 19 nt, synthetic construct
  source 1..19: mol_type = other RNA
cagagcctgctggatgaat

SEQ ID NO: 1844 - RNA, 19 nt, synthetic construct
  source 1..19: mol_type = other RNA
agcaggctctgggctggaa

SEQ ID NO: 1845 - RNA, 19 nt, synthetic construct
  source 1..19: mol_type = other RNA
ttccagcccagagcctgct

SEQ ID NO: 1846 - RNA, 19 nt, synthetic construct
  source 1..19: mol_type = other RNA
acatctatgcctccgtcat

SEQ ID NO: 1847 - RNA, 19 nt, synthetic construct
  source 1..19: mol_type = other RNA
atgacggaggcatagatgt

SEQ ID NO: 1848 - RNA, 19 nt, synthetic construct
  source 1..19: mol_type = other RNA
catctatgcctccgtcatc

SEQ ID NO: 1849 - RNA, 19 nt, synthetic construct
  source 1..19: mol_type = other RNA
gatgacggaggcatagatg

SEQ ID NO: 1850 - RNA, 19 nt, synthetic construct
  source 1..19: mol_type = other RNA
atctatgcctccgtcatcg

SEQ ID NO: 1851 - RNA, 19 nt, synthetic construct
  source 1..19: mol_type = other RNA
cgatgacggaggcatagat

SEQ ID NO: 1852 - RNA, 19 nt, synthetic construct
  source 1..19: mol_type = other RNA
tctatgcctccgtcatcgc

SEQ ID NO: 1853 - RNA, 19 nt, synthetic construct
  source 1..19: mol_type = other RNA
gcgatgacggaggcataga

SEQ ID NO: 1854 - RNA, 19 nt, synthetic construct
  source 1..19: mol_type = other RNA
ctatgcctccgtcatcgcg

SEQ ID NO: 1855 - RNA, 19 nt, synthetic construct
  source 1..19: mol_type = other RNA
cgcgatgacggaggcatag

SEQ ID NO: 1856 - RNA, 19 nt, synthetic construct
  source 1..19: mol_type = other RNA
tatgcctccgtcatcgcgc

SEQ ID NO: 1857 - RNA, 19 nt, synthetic construct
  source 1..19: mol_type = other RNA
gcgcgatgacggaggcata

SEQ ID NO: 1858 - RNA, 19 nt, synthetic construct
  source 1..19: mol_type = other RNA
atgcctccgtcatcgcgct

SEQ ID NO: 1859 - RNA, 19 nt, synthetic construct
  source 1..19: mol_type = other RNA
agcgcgatgacggaggcat

SEQ ID NO: 1860 - RNA, 19 nt, synthetic construct
  source 1..19: mol_type = other RNA
tgcctccgtcatcgcgctt

SEQ ID NO: 1861 - RNA, 19 nt, synthetic construct
  source 1..19: mol_type = other RNA
aagcgcgatgacggaggca

SEQ ID NO: 1862 - RNA, 19 nt, synthetic construct
  source 1..19: mol_type = other RNA
cctccgtcatcgcgcttct

SEQ ID NO: 1863 - RNA, 19 nt, synthetic construct
  source 1..19: mol_type = other RNA
agaagcgcgatgacggagg

SEQ ID NO: 1864 - RNA, 19 nt, synthetic construct
  source 1..19: mol_type = other RNA
ctccgtcatcgcgcttctg

SEQ ID NO: 1865 - RNA, 19 nt, synthetic construct
  source 1..19: mol_type = other RNA
cagaagcgcgatgacggag

SEQ ID NO: 1866 - RNA, 19 nt, synthetic construct
  source 1..19: mol_type = other RNA
tccgtcatcgcgcttctgg

SEQ ID NO: 1867 - RNA, 19 nt, synthetic construct
  source 1..19: mol_type = other RNA
ccagaagcgcgatgacgga

SEQ ID NO: 1868 - RNA, 19 nt, synthetic construct
  source 1..19: mol_type = other RNA
gtcatcgcgcttctgggca

SEQ ID NO: 1869 - RNA, 19 nt, synthetic construct
  source 1..19: mol_type = other RNA
tgcccagaagcgcgatgac

SEQ ID NO: 1870 - RNA, 19 nt, synthetic construct
  source 1..19: mol_type = other RNA
tcatcgcgcttctgggcat

SEQ ID NO: 1871 - RNA, 19 nt, synthetic construct
  source 1..19: mol_type = other RNA
atgcccagaagcgcgatga

SEQ ID NO: 1872 - RNA, 19 nt, synthetic construct
  source 1..19: mol_type = other RNA
catcgcgcttctgggcatc

SEQ ID NO: 1873 - RNA, 19 nt, synthetic construct
  source 1..19: mol_type = other RNA
gatgcccagaagcgcgatg

SEQ ID NO: 1874 - RNA, 19 nt, synthetic construct
  source 1..19: mol_type = other RNA
atcgcgcttctgggcatca

SEQ ID NO: 1875 - RNA, 19 nt, synthetic construct
  source 1..19: mol_type = other RNA
tgatgcccagaagcgcgat

SEQ ID NO: 1876 - RNA, 19 nt, synthetic construct
  source 1..19: mol_type = other RNA
tcgcgcttctgggcatcac

SEQ ID NO: 1877 - RNA, 19 nt, synthetic construct
  source 1..19: mol_type = other RNA
gtgatgcccagaagcgcga

SEQ ID NO: 1878 - RNA, 19 nt, synthetic construct
  source 1..19: mol_type = other RNA
gcgcttctgggcatcacca

SEQ ID NO: 1879 - RNA, 19 nt, synthetic construct
  source 1..19: mol_type = other RNA
tggtgatgcccagaagcgc

SEQ ID NO: 1880 - RNA, 19 nt, synthetic construct
  source 1..19: mol_type = other RNA
cgcttctgggcatcaccat

SEQ ID NO: 1881 - RNA, 19 nt, synthetic construct
  source 1..19: mol_type = other RNA
atggtgatgcccagaagcg

SEQ ID NO: 1882 - RNA, 19 nt, synthetic construct
  source 1..19: mol_type = other RNA
cttctgggcatcaccatga

SEQ ID NO: 1883 - RNA, 19 nt, synthetic construct
  source 1..19: mol_type = other RNA
tcatggtgatgcccagaag

SEQ ID NO: 1884 - RNA, 19 nt, synthetic construct
  source 1..19: mol_type = other RNA
tcaccatgatttacacggt

SEQ ID NO: 1885 - RNA, 19 nt, synthetic construct
  source 1..19: mol_type = other RNA
accgtgtaaatcatggtga

SEQ ID NO: 1886 - RNA, 19 nt, synthetic construct
  source 1..19: mol_type = other RNA
accatgatttacacggtga

SEQ ID NO: 1887 - RNA, 19 nt, synthetic construct
  source 1..19: mol_type = other RNA
tcaccgtgtaaatcatggt

SEQ ID NO: 1888 - RNA, 19 nt, synthetic construct
  source 1..19: mol_type = other RNA
ccatgatttacacggtgac

SEQ ID NO: 1889 - RNA, 19 nt, synthetic construct
  source 1..19: mol_type = other RNA
gtcaccgtgtaaatcatgg

SEQ ID NO: 1890 - RNA, 19 nt, synthetic construct
  source 1..19: mol_type = other RNA
catgatttacacggtgaca

SEQ ID NO: 1891 - RNA, 19 nt, synthetic construct
  source 1..19: mol_type = other RNA
tgtcaccgtgtaaatcatg

SEQ ID NO: 1892 - RNA, 19 nt, synthetic construct
  source 1..19: mol_type = other RNA
atgatttacacggtgacag

SEQ ID NO: 1893 - RNA, 19 nt, synthetic construct
  source 1..19: mol_type = other RNA
ctgtcaccgtgtaaatcat

SEQ ID NO: 1894 - RNA, 19 nt, synthetic construct
  source 1..19: mol_type = other RNA
tgatttacacggtgacagg

SEQ ID NO: 1895 - RNA, 19 nt, synthetic construct
  source 1..19: mol_type = other RNA
cctgtcaccgtgtaaatca

SEQ ID NO: 1896 - RNA, 19 nt, synthetic construct
  source 1..19: mol_type = other RNA
gatttacacggtgacagga

SEQ ID NO: 1897 - RNA, 19 nt, synthetic construct
  source 1..19: mol_type = other RNA
tcctgtcaccgtgtaaatc

SEQ ID NO: 1898 - RNA, 19 nt, synthetic construct
  source 1..19: mol_type = other RNA
atttacacggtgacaggag

SEQ ID NO: 1899 - RNA, 19 nt, synthetic construct
  source 1..19: mol_type = other RNA
ctcctgtcaccgtgtaaat

SEQ ID NO: 1900 - RNA, 19 nt, synthetic construct
  source 1..19: mol_type = other RNA
tttacacggtgacaggagg

SEQ ID NO: 1901 - RNA, 19 nt, synthetic construct
  source 1..19: mol_type = other RNA
cctcctgtcaccgtgtaaa

SEQ ID NO: 1902 - RNA, 19 nt, synthetic construct
  source 1..19: mol_type = other RNA
ttacacggtgacaggaggg

SEQ ID NO: 1903 - RNA, 19 nt, synthetic construct
  source 1..19: mol_type = other RNA
ccctcctgtcaccgtgtaa

SEQ ID NO: 1904 - RNA, 19 nt, synthetic construct
  source 1..19: mol_type = other RNA
tacacggtgacaggagggc

SEQ ID NO: 1905 - RNA, 19 nt, synthetic construct
  source 1..19: mol_type = other RNA
gccctcctgtcaccgtgta

SEQ ID NO: 1906 - RNA, 19 nt, synthetic construct
  source 1..19: mol_type = other RNA
cgcgctgatgtacacggac

SEQ ID NO: 1907 - RNA, 19 nt, synthetic construct
  source 1..19: mol_type = other RNA
gtccgtgtacatcagcgcg

SEQ ID NO: 1908 - RNA, 19 nt, synthetic construct
  source 1..19: mol_type = other RNA
gcgctgatgtacacggaca

SEQ ID NO: 1909 - RNA, 19 nt, synthetic construct
  source 1..19: mol_type = other RNA
tgtccgtgtacatcagcgc

SEQ ID NO: 1910 - RNA, 19 nt, synthetic construct
  source 1..19: mol_type = other RNA
cgctgatgtacacggacac

SEQ ID NO: 1911 - RNA, 19 nt, synthetic construct
  source 1..19: mol_type = other RNA
gtgtccgtgtacatcagcg

SEQ ID NO: 1912 - RNA, 19 nt, synthetic construct
  source 1..19: mol_type = other RNA
gatgtacacggacacggta

SEQ ID NO: 1913 - RNA, 19 nt, synthetic construct
  source 1..19: mol_type = other RNA
taccgtgtccgtgtacatc

SEQ ID NO: 1914 - RNA, 19 nt, synthetic construct
  source 1..19: mol_type = other RNA
tacacggacacggtacaga

SEQ ID NO: 1915 - RNA, 19 nt, synthetic construct
  source 1..19: mol_type = other RNA
tctgtaccgtgtccgtgta

SEQ ID NO: 1916 - RNA, 19 nt, synthetic construct
  source 1..19: mol_type = other RNA
acacggacacggtacagac

SEQ ID NO: 1917 - RNA, 19 nt, synthetic construct
  source 1..19: mol_type = other RNA
gtctgtaccgtgtccgtgt

SEQ ID NO: 1918 - RNA, 19 nt, synthetic construct
  source 1..19: mol_type = other RNA
cacggacacggtacagacc

SEQ ID NO: 1919 - RNA, 19 nt, synthetic construct
  source 1..19: mol_type = other RNA
ggtctgtaccgtgtccgtg

SEQ ID NO: 1920 - RNA, 19 nt, synthetic construct
  source 1..19: mol_type = other RNA
acggacacggtacagacct

SEQ ID NO: 1921 - RNA, 19 nt, synthetic construct
  source 1..19: mol_type = other RNA
aggtctgtaccgtgtccgt

SEQ ID NO: 1922 - RNA, 19 nt, synthetic construct
  source 1..19: mol_type = other RNA
cggacacggtacagacctt

SEQ ID NO: 1923 - RNA, 19 nt, synthetic construct
  source 1..19: mol_type = other RNA
aaggtctgtaccgtgtccg

SEQ ID NO: 1924 - RNA, 19 nt, synthetic construct
  source 1..19: mol_type = other RNA
acggtacagaccttcgtca

SEQ ID NO: 1925 - RNA, 19 nt, synthetic construct
  source 1..19: mol_type = other RNA
tgacgaaggtctgtaccgt

SEQ ID NO: 1926 - RNA, 19 nt, synthetic construct
  source 1..19: mol_type = other RNA
cggtacagaccttcgtcat

SEQ ID NO: 1927 - RNA, 19 nt, synthetic construct
  source 1..19: mol_type = other RNA
atgacgaaggtctgtaccg

SEQ ID NO: 1928 - RNA, 19 nt, synthetic construct
  source 1..19: mol_type = other RNA
ggtacagaccttcgtcatt

SEQ ID NO: 1929 - RNA, 19 nt, synthetic construct
  source 1..19: mol_type = other RNA
aatgacgaaggtctgtacc

SEQ ID NO: 1930 - RNA, 19 nt, synthetic construct
  source 1..19: mol_type = other RNA
gtacagaccttcgtcattc

SEQ ID NO: 1931 - RNA, 19 nt, synthetic construct
  source 1..19: mol_type = other RNA
gaatgacgaaggtctgtac

SEQ ID NO: 1932 - RNA, 19 nt, synthetic construct
  source 1..19: mol_type = other RNA
tacagaccttcgtcattct

SEQ ID NO: 1933 - RNA, 19 nt, synthetic construct
  source 1..19: mol_type = other RNA
agaatgacgaaggtctgta

SEQ ID NO: 1934 - RNA, 19 nt, synthetic construct
  source 1..19: mol_type = other RNA
agaccttcgtcattctggg

SEQ ID NO: 1935 - RNA, 19 nt, synthetic construct
  source 1..19: mol_type = other RNA
cccagaatgacgaaggtct

SEQ ID NO: 1936 - RNA, 19 nt, synthetic construct
  source 1..19: mol_type = other RNA
cgcctgcatcctcatgggt

SEQ ID NO: 1937 - RNA, 19 nt, synthetic construct
  source 1..19: mol_type = other RNA
acccatgaggatgcaggcg

SEQ ID NO: 1938 - RNA, 19 nt, synthetic construct
  source 1..19: mol_type = other RNA
gcctgcatcctcatgggtt

SEQ ID NO: 1939 - RNA, 19 nt, synthetic construct
  source 1..19: mol_type = other RNA
aacccatgaggatgcaggc

SEQ ID NO: 1940 - RNA, 19 nt, synthetic construct
  source 1..19: mol_type = other RNA
cctgcatcctcatgggtta

SEQ ID NO: 1941 - RNA, 19 nt, synthetic construct
  source 1..19: mol_type = other RNA
taacccatgaggatgcagg

SEQ ID NO: 1942 - RNA, 19 nt, synthetic construct
  source 1..19: mol_type = other RNA
ctgcatcctcatgggttac

SEQ ID NO: 1943 - RNA, 19 nt, synthetic construct
  source 1..19: mol_type = other RNA
gtaacccatgaggatgcag

SEQ ID NO: 1944 - RNA, 19 nt, synthetic construct
  source 1..19: mol_type = other RNA
tgcatcctcatgggttacg

SEQ ID NO: 1945 - RNA, 19 nt, synthetic construct
  source 1..19: mol_type = other RNA
cgtaacccatgaggatgca

SEQ ID NO: 1946 - RNA, 19 nt, synthetic construct
  source 1..19: mol_type = other RNA
gcatcctcatgggttacgc

SEQ ID NO: 1947 - RNA, 19 nt, synthetic construct
  source 1..19: mol_type = other RNA
gcgtaacccatgaggatgc

SEQ ID NO: 1948 - RNA, 19 nt, synthetic construct
  source 1..19: mol_type = other RNA
catcctcatgggttacgcc

SEQ ID NO: 1949 - RNA, 19 nt, synthetic construct
  source 1..19: mol_type = other RNA
ggcgtaacccatgaggatg

SEQ ID NO: 1950 - RNA, 19 nt, synthetic construct
  source 1..19: mol_type = other RNA
atcctcatgggttacgcct

SEQ ID NO: 1951 - RNA, 19 nt, synthetic construct
  source 1..19: mol_type = other RNA
aggcgtaacccatgaggat

SEQ ID NO: 1952 - RNA, 19 nt, synthetic construct
  source 1..19: mol_type = other RNA
tcctcatgggttacgcctt

SEQ ID NO: 1953 - RNA, 19 nt, synthetic construct
  source 1..19: mol_type = other RNA
aaggcgtaacccatgagga

SEQ ID NO: 1954 - RNA, 19 nt, synthetic construct
  source 1..19: mol_type = other RNA
cctcatgggttacgccttc

SEQ ID NO: 1955 - RNA, 19 nt, synthetic construct
  source 1..19: mol_type = other RNA
gaaggcgtaacccatgagg

SEQ ID NO: 1956 - RNA, 19 nt, synthetic construct
  source 1..19: mol_type = other RNA
ctcatgggttacgccttcc

SEQ ID NO: 1957 - RNA, 19 nt, synthetic construct
  source 1..19: mol_type = other RNA
ggaaggcgtaacccatgag

SEQ ID NO: 1958 - RNA, 19 nt, synthetic construct
  source 1..19: mol_type = other RNA
tcatgggttacgccttcca

SEQ ID NO: 1959 - RNA, 19 nt, synthetic construct
  source 1..19: mol_type = other RNA
tggaaggcgtaacccatga

SEQ ID NO: 1960 - RNA, 19 nt, synthetic construct
  source 1..19: mol_type = other RNA
catgggttacgccttccac

SEQ ID NO: 1961 - RNA, 19 nt, synthetic construct
  source 1..19: mol_type = other RNA
gtggaaggcgtaacccatg

SEQ ID NO: 1962 - RNA, 19 nt, synthetic construct
  source 1..19: mol_type = other RNA
atgggttacgccttccacg

SEQ ID NO: 1963 - RNA, 19 nt, synthetic construct
  source 1..19: mol_type = other RNA
cgtggaaggcgtaacccat

SEQ ID NO: 1964 - RNA, 19 nt, synthetic construct
  source 1..19: mol_type = other RNA
tgggttacgccttccacga

SEQ ID NO: 1965 - RNA, 19 nt, synthetic construct
  source 1..19: mol_type = other RNA
tcgtggaaggcgtaaccca

SEQ ID NO: 1966 - RNA, 19 nt, synthetic construct
  source 1..19: mol_type = other RNA
gggttacgccttccacgag

SEQ ID NO: 1967 - RNA, 19 nt, synthetic construct
  source 1..19: mol_type = other RNA
ctcgtggaaggcgtaaccc

SEQ ID NO: 1968 - RNA, 19 nt, synthetic construct
  source 1..19: mol_type = other RNA
ggttacgccttccacgagg

SEQ ID NO: 1969 - RNA, 19 nt, synthetic construct
  source 1..19: mol_type = other RNA
cctcgtggaaggcgtaacc

SEQ ID NO: 1970 - RNA, 19 nt, synthetic construct
  source 1..19: mol_type = other RNA
gttacgccttccacgaggt

SEQ ID NO: 1971 - RNA, 19 nt, synthetic construct
  source 1..19: mol_type = other RNA
acctcgtggaaggcgtaac

SEQ ID NO: 1972 - RNA, 19 nt, synthetic construct
  source 1..19: mol_type = other RNA
ttacgccttccacgaggtg

SEQ ID NO: 1973 - RNA, 19 nt, synthetic construct
  source 1..19: mol_type = other RNA
cacctcgtggaaggcgtaa

SEQ ID NO: 1974 - RNA, 19 nt, synthetic construct
  source 1..19: mol_type = other RNA
gcgggtattcgggtctctt

SEQ ID NO: 1975 - RNA, 19 nt, synthetic construct
  source 1..19: mol_type = other RNA
aagagacccgaatacccgc

SEQ ID NO: 1976 - RNA, 19 nt, synthetic construct
  source 1..19: mol_type = other RNA
cgggtattcgggtctcttc

SEQ ID NO: 1977 - RNA, 19 nt, synthetic construct
  source 1..19: mol_type = other RNA
gaagagacccgaatacccg

SEQ ID NO: 1978 - RNA, 19 nt, synthetic construct
  source 1..19: mol_type = other RNA
gggtattcgggtctcttcg

SEQ ID NO: 1979 - RNA, 19 nt, synthetic construct
  source 1..19: mol_type = other RNA
cgaagagacccgaataccc

SEQ ID NO: 1980 - RNA, 19 nt, synthetic construct
  source 1..19: mol_type = other RNA
ggtattcgggtctcttcga

SEQ ID NO: 1981 - RNA, 19 nt, synthetic construct
  source 1..19: mol_type = other RNA
tcgaagagacccgaatacc

SEQ ID NO: 1982 - RNA, 19 nt, synthetic construct
  source 1..19: mol_type = other RNA
gtattcgggtctcttcgac

SEQ ID NO: 1983 - RNA, 19 nt, synthetic construct
  source 1..19: mol_type = other RNA
gtcgaagagacccgaatac

SEQ ID NO: 1984 - RNA, 19 nt, synthetic construct
  source 1..19: mol_type = other RNA
tattcgggtctcttcgaca

SEQ ID NO: 1985 - RNA, 19 nt, synthetic construct
  source 1..19: mol_type = other RNA
tgtcgaagagacccgaata

SEQ ID NO: 1986 - RNA, 19 nt, synthetic construct
  source 1..19: mol_type = other RNA
caaatacctgggagcagcg

SEQ ID NO: 1987 - RNA, 19 nt, synthetic construct
  source 1..19: mol_type = other RNA
cgctgctcccaggtatttg

SEQ ID NO: 1988 - RNA, 19 nt, synthetic construct
  source 1..19: mol_type = other RNA
aaatacctgggagcagcga

SEQ ID NO: 1989 - RNA, 19 nt, synthetic construct
  source 1..19: mol_type = other RNA
tcgctgctcccaggtattt

SEQ ID NO: 1990 - RNA, 19 nt, synthetic construct
  source 1..19: mol_type = other RNA
aatacctgggagcagcgac

SEQ ID NO: 1991 - RNA, 19 nt, synthetic construct
  source 1..19: mol_type = other RNA
gtcgctgctcccaggtatt

SEQ ID NO: 1992 - RNA, 19 nt, synthetic construct
  source 1..19: mol_type = other RNA
atacctgggagcagcgact

SEQ ID NO: 1993 - RNA, 19 nt, synthetic construct
  source 1..19: mol_type = other RNA
agtcgctgctcccaggtat

SEQ ID NO: 1994 - RNA, 19 nt, synthetic construct
  source 1..19: mol_type = other RNA
tacctgggagcagcgactt

SEQ ID NO: 1995 - RNA, 19 nt, synthetic construct
  source 1..19: mol_type = other RNA
aagtcgctgctcccaggta

SEQ ID NO: 1996 - RNA, 19 nt, synthetic construct
  source 1..19: mol_type = other RNA
acctgggagcagcgacttc

SEQ ID NO: 1997 - RNA, 19 nt, synthetic construct
  source 1..19: mol_type = other RNA
gaagtcgctgctcccaggt

SEQ ID NO: 1998 - RNA, 19 nt, synthetic construct
  source 1..19: mol_type = other RNA
gcgacttcgctgacggtgt

SEQ ID NO: 1999 - RNA, 19 nt, synthetic construct
  source 1..19: mol_type = other RNA
acaccgtcagcgaagtcgc

SEQ ID NO: 2000 - RNA, 19 nt, synthetic construct
  source 1..19: mol_type = other RNA
cgacttcgctgacggtgtc

SEQ ID NO: 2001 - RNA, 19 nt, synthetic construct
  source 1..19: mol_type = other RNA
gacaccgtcagcgaagtcg

SEQ ID NO: 2002 - RNA, 19 nt, synthetic construct
  source 1..19: mol_type = other RNA
gacttcgctgacggtgtcc

SEQ ID NO: 2003 - RNA, 19 nt, synthetic construct
  source 1..19: mol_type = other RNA
ggacaccgtcagcgaagtc

SEQ ID NO: 2004 - RNA, 19 nt, synthetic construct
  source 1..19: mol_type = other RNA
acttcgctgacggtgtccg

SEQ ID NO: 2005 - RNA, 19 nt, synthetic construct
  source 1..19: mol_type = other RNA
cggacaccgtcagcgaagt

SEQ ID NO: 2006 - RNA, 19 nt, synthetic construct
  source 1..19: mol_type = other RNA
cttcgctgacggtgtccga

SEQ ID NO: 2007 - RNA, 19 nt, synthetic construct
  source 1..19: mol_type = other RNA
tcggacaccgtcagcgaag

SEQ ID NO: 2008 - RNA, 19 nt, synthetic construct
  source 1..19: mol_type = other RNA
ttcgctgacggtgtccgag

SEQ ID NO: 2009 - RNA, 19 nt, synthetic construct
  source 1..19: mol_type = other RNA
ctcggacaccgtcagcgaa

SEQ ID NO: 2010 - RNA, 19 nt, synthetic construct
  source 1..19: mol_type = other RNA
gctgacggtgtccgaggat

SEQ ID NO: 2011 - RNA, 19 nt, synthetic construct
  source 1..19: mol_type = other RNA
atcctcggacaccgtcagc

SEQ ID NO: 2012 - RNA, 19 nt, synthetic construct
  source 1..19: mol_type = other RNA
ctgacggtgtccgaggatc

SEQ ID NO: 2013 - RNA, 19 nt, synthetic construct
  source 1..19: mol_type = other RNA
gatcctcggacaccgtcag

SEQ ID NO: 2014 - RNA, 19 nt, synthetic construct
  source 1..19: mol_type = other RNA
tgacggtgtccgaggatcc

SEQ ID NO: 2015 - RNA, 19 nt, synthetic construct
  source 1..19: mol_type = other RNA
ggatcctcggacaccgtca

SEQ ID NO: 2016 - RNA, 19 nt, synthetic construct
  source 1..19: mol_type = other RNA
gacggtgtccgaggatcca

SEQ ID NO: 2017 - RNA, 19 nt, synthetic construct
  source 1..19: mol_type = other RNA
tggatcctcggacaccgtc

SEQ ID NO: 2018 - RNA, 19 nt, synthetic construct
  source 1..19: mol_type = other RNA
acggtgtccgaggatccag

SEQ ID NO: 2019 - RNA, 19 nt, synthetic construct
  source 1..19: mol_type = other RNA
ctggatcctcggacaccgt

SEQ ID NO: 2020 - RNA, 19 nt, synthetic construct
  source 1..19: mol_type = other RNA
atctccagcttctgctatc

SEQ ID NO: 2021 - RNA, 19 nt, synthetic construct
  source 1..19: mol_type = other RNA
gatagcagaagctggagat

SEQ ID NO: 2022 - RNA, 19 nt, synthetic construct
  source 1..19: mol_type = other RNA
tctccagcttctgctatcg

SEQ ID NO: 2023 - RNA, 19 nt, synthetic construct
  source 1..19: mol_type = other RNA
cgatagcagaagctggaga

SEQ ID NO: 2024 - RNA, 19 nt, synthetic construct
  source 1..19: mol_type = other RNA
ctccagcttctgctatcga

SEQ ID NO: 2025 - RNA, 19 nt, synthetic construct
  source 1..19: mol_type = other RNA
tcgatagcagaagctggag

SEQ ID NO: 2026 - RNA, 19 nt, synthetic construct
  source 1..19: mol_type = other RNA
tccagcttctgctatcgac

SEQ ID NO: 2027 - RNA, 19 nt, synthetic construct
  source 1..19: mol_type = other RNA
gtcgatagcagaagctgga

SEQ ID NO: 2028 - RNA, 19 nt, synthetic construct
  source 1..19: mol_type = other RNA
cgactcctaccacctgctc

SEQ ID NO: 2029 - RNA, 19 nt, synthetic construct
  source 1..19: mol_type = other RNA
gagcaggtggtaggagtcg

SEQ ID NO: 2030 - RNA, 19 nt, synthetic construct
  source 1..19: mol_type = other RNA
gactcctaccacctgctcc

SEQ ID NO: 2031 - RNA, 19 nt, synthetic construct
  source 1..19: mol_type = other RNA
ggagcaggtggtaggagtc

SEQ ID NO: 2032 - RNA, 19 nt, synthetic construct
  source 1..19: mol_type = other RNA
actcctaccacctgctccg

SEQ ID NO: 2033 - RNA, 19 nt, synthetic construct
  source 1..19: mol_type = other RNA
cggagcaggtggtaggagt

SEQ ID NO: 2034 - RNA, 19 nt, synthetic construct
  source 1..19: mol_type = other RNA
gctgctcctcggactcaca

SEQ ID NO: 2035 - RNA, 19 nt, synthetic construct
  source 1..19: mol_type = other RNA
tgtgagtccgaggagcagc

SEQ ID NO: 2036 - RNA, 19 nt, synthetic construct
  source 1..19: mol_type = other RNA
caatcgtctcgggctggta

SEQ ID NO: 2037 - RNA, 19 nt, synthetic construct
  source 1..19: mol_type = other RNA
taccagcccgagacgattg

SEQ ID NO: 2038 - RNA, 19 nt, synthetic construct
  source 1..19: mol_type = other RNA
aatcgtctcgggctggtac

SEQ ID NO: 2039 - RNA, 19 nt, synthetic construct
  source 1..19: mol_type = other RNA
gtaccagcccgagacgatt

SEQ ID NO: 2040 - RNA, 19 nt, synthetic construct
  source 1..19: mol_type = other RNA
atcgtctcgggctggtact

SEQ ID NO: 2041 - RNA, 19 nt, synthetic construct
  source 1..19: mol_type = other RNA
agtaccagcccgagacgat

SEQ ID NO: 2042 - RNA, 19 nt, synthetic construct
  source 1..19: mol_type = other RNA
tcgtctcgggctggtactg

SEQ ID NO: 2043 - RNA, 19 nt, synthetic construct
  source 1..19: mol_type = other RNA
cagtaccagcccgagacga

SEQ ID NO: 2044 - RNA, 19 nt, synthetic construct
  source 1..19: mol_type = other RNA
gtctcgggctggtactggt

SEQ ID NO: 2045 - RNA, 19 nt, synthetic construct
  source 1..19: mol_type = other RNA
accagtaccagcccgagac

SEQ ID NO: 2046 - RNA, 19 nt, synthetic construct
  source 1..19: mol_type = other RNA
tctcgggctggtactggtg

SEQ ID NO: 2047 - RNA, 19 nt, synthetic construct
  source 1..19: mol_type = other RNA
caccagtaccagcccgaga

SEQ ID NO: 2048 - RNA, 19 nt, synthetic construct
  source 1..19: mol_type = other RNA
ctggtactggtgcagcgac

SEQ ID NO: 2049 - RNA, 19 nt, synthetic construct
  source 1..19: mol_type = other RNA
gtcgctgcaccagtaccag

SEQ ID NO: 2050 - RNA, 19 nt, synthetic construct
  source 1..19: mol_type = other RNA
tggtactggtgcagcgacc

SEQ ID NO: 2051 - RNA, 19 nt, synthetic construct
  source 1..19: mol_type = other RNA
ggtcgctgcaccagtacca

SEQ ID NO: 2052 - RNA, 19 nt, synthetic construct
  source 1..19: mol_type = other RNA
tgcagcgaccaggtcatcg

SEQ ID NO: 2053 - RNA, 19 nt, synthetic construct
  source 1..19: mol_type = other RNA
cgatgacctggtcgctgca

SEQ ID NO: 2054 - RNA, 19 nt, synthetic construct
  source 1..19: mol_type = other RNA
gcagcgaccaggtcatcgt

SEQ ID NO: 2055 - RNA, 19 nt, synthetic construct
  source 1..19: mol_type = other RNA
acgatgacctggtcgctgc

SEQ ID NO: 2056 - RNA, 19 nt, synthetic construct
  source 1..19: mol_type = other RNA
cagcgaccaggtcatcgtg

SEQ ID NO: 2057 - RNA, 19 nt, synthetic construct
  source 1..19: mol_type = other RNA
cacgatgacctggtcgctg

SEQ ID NO: 2058 - RNA, 19 nt, synthetic construct
  source 1..19: mol_type = other RNA
agcgaccaggtcatcgtgc

SEQ ID NO: 2059 - RNA, 19 nt, synthetic construct
  source 1..19: mol_type = other RNA
gcacgatgacctggtcgct

SEQ ID NO: 2060 - RNA, 19 nt, synthetic construct
  source 1..19: mol_type = other RNA
gcgaccaggtcatcgtgca

SEQ ID NO: 2061 - RNA, 19 nt, synthetic construct
  source 1..19: mol_type = other RNA
tgcacgatgacctggtcgc

SEQ ID NO: 2062 - RNA, 19 nt, synthetic construct
  source 1..19: mol_type = other RNA
caggtcatcgtgcagcgct

SEQ ID NO: 2063 - RNA, 19 nt, synthetic construct
  source 1..19: mol_type = other RNA
agcgctgcacgatgacctg

SEQ ID NO: 2064 - RNA, 19 nt, synthetic construct
  source 1..19: mol_type = other RNA
aggtcatcgtgcagcgctg

SEQ ID NO: 2065 - RNA, 19 nt, synthetic construct
  source 1..19: mol_type = other RNA
cagcgctgcacgatgacct

SEQ ID NO: 2066 - RNA, 19 nt, synthetic construct
  source 1..19: mol_type = other RNA
tcatcgtgcagcgctgcct

SEQ ID NO: 2067 - RNA, 19 nt, synthetic construct
  source 1..19: mol_type = other RNA
aggcagcgctgcacgatga

SEQ ID NO: 2068 - RNA, 19 nt, synthetic construct
  source 1..19: mol_type = other RNA
agagcctgacccacatcaa

SEQ ID NO: 2069 - RNA, 19 nt, synthetic construct
  source 1..19: mol_type = other RNA
ttgatgtgggtcaggctct

SEQ ID NO: 2070 - RNA, 19 nt, synthetic construct
  source 1..19: mol_type = other RNA
gagcctgacccacatcaag

SEQ ID NO: 2071 - RNA, 19 nt, synthetic construct
  source 1..19: mol_type = other RNA
cttgatgtgggtcaggctc

SEQ ID NO: 2072 - RNA, 19 nt, synthetic construct
  source 1..19: mol_type = other RNA
agcctgacccacatcaagg

SEQ ID NO: 2073 - RNA, 19 nt, synthetic construct
  source 1..19: mol_type = other RNA
ccttgatgtgggtcaggct

SEQ ID NO: 2074 - RNA, 19 nt, synthetic construct
  source 1..19: mol_type = other RNA
cctgacccacatcaaggcg

SEQ ID NO: 2075 - RNA, 19 nt, synthetic construct
  source 1..19: mol_type = other RNA
cgccttgatgtgggtcagg

SEQ ID NO: 2076 - RNA, 19 nt, synthetic construct
  source 1..19: mol_type = other RNA
ctgacccacatcaaggcgg

SEQ ID NO: 2077 - RNA, 19 nt, synthetic construct
  source 1..19: mol_type = other RNA
ccgccttgatgtgggtcag

SEQ ID NO: 2078 - RNA, 19 nt, synthetic construct
  source 1..19: mol_type = other RNA
gctgcatcctgtgtgggta

SEQ ID NO: 2079 - RNA, 19 nt, synthetic construct
  source 1..19: mol_type = other RNA
tacccacacaggatgcagc

SEQ ID NO: 2080 - RNA, 19 nt, synthetic construct
  source 1..19: mol_type = other RNA
ctgcatcctgtgtgggtac

SEQ ID NO: 2081 - RNA, 19 nt, synthetic construct
  source 1..19: mol_type = other RNA
gtacccacacaggatgcag

SEQ ID NO: 2082 - RNA, 19 nt, synthetic construct
  source 1..19: mol_type = other RNA
tgcatcctgtgtgggtacc

SEQ ID NO: 2083 - RNA, 19 nt, synthetic construct
  source 1..19: mol_type = other RNA
ggtacccacacaggatgca

SEQ ID NO: 2084 - RNA, 19 nt, synthetic construct
  source 1..19: mol_type = other RNA
gcatcctgtgtgggtacct

SEQ ID NO: 2085 - RNA, 19 nt, synthetic construct
  source 1..19: mol_type = other RNA
aggtacccacacaggatgc

SEQ ID NO: 2086 - RNA, 19 nt, synthetic construct
  source 1..19: mol_type = other RNA
catcctgtgtgggtacctg

SEQ ID NO: 2087 - RNA, 19 nt, synthetic construct
  source 1..19: mol_type = other RNA
caggtacccacacaggatg

SEQ ID NO: 2088 - RNA, 19 nt, synthetic construct
  source 1..19: mol_type = other RNA
atcctgtgtgggtacctga

SEQ ID NO: 2089 - RNA, 19 nt, synthetic construct
  source 1..19: mol_type = other RNA
tcaggtacccacacaggat

SEQ ID NO: 2090 - RNA, 19 nt, synthetic construct
  source 1..19: mol_type = other RNA
tcctgtgtgggtacctgaa

SEQ ID NO: 2091 - RNA, 19 nt, synthetic construct
  source 1..19: mol_type = other RNA
ttcaggtacccacacagga

SEQ ID NO: 2092 - RNA, 19 nt, synthetic construct
  source 1..19: mol_type = other RNA
cctgtgtgggtacctgaag

SEQ ID NO: 2093 - RNA, 19 nt, synthetic construct
  source 1..19: mol_type = other RNA
cttcaggtacccacacagg

SEQ ID NO: 2094 - RNA, 19 nt, synthetic construct
  source 1..19: mol_type = other RNA
ctgtgtgggtacctgaagc

SEQ ID NO: 2095 - RNA, 19 nt, synthetic construct
  source 1..19: mol_type = other RNA
gcttcaggtacccacacag

SEQ ID NO: 2096 - RNA, 19 nt, synthetic construct
  source 1..19: mol_type = other RNA
tgtgtgggtacctgaagct

SEQ ID NO: 2097 - RNA, 19 nt, synthetic construct
  source 1..19: mol_type = other RNA
agcttcaggtacccacaca

SEQ ID NO: 2098 - RNA, 19 nt, synthetic construct
  source 1..19: mol_type = other RNA
gtgtgggtacctgaagctg

SEQ ID NO: 2099 - RNA, 19 nt, synthetic construct
  source 1..19: mol_type = other RNA
cagcttcaggtacccacac

SEQ ID NO: 2100 - RNA, 19 nt, synthetic construct
  source 1..19: mol_type = other RNA
tgtgggtacctgaagctga

SEQ ID NO: 2101 - RNA, 19 nt, synthetic construct
  source 1..19: mol_type = other RNA
tcagcttcaggtacccaca

SEQ ID NO: 2102 - RNA, 19 nt, synthetic construct
  source 1..19: mol_type = other RNA
gtgggtacctgaagctgac

SEQ ID NO: 2103 - RNA, 19 nt, synthetic construct
  source 1..19: mol_type = other RNA
gtcagcttcaggtacccac

SEQ ID NO: 2104 - RNA, 19 nt, synthetic construct
  source 1..19: mol_type = other RNA
tgggtacctgaagctgacg

SEQ ID NO: 2105 - RNA, 19 nt, synthetic construct
  source 1..19: mol_type = other RNA
cgtcagcttcaggtaccca

SEQ ID NO: 2106 - RNA, 19 nt, synthetic construct
  source 1..19: mol_type = other RNA
gggtacctgaagctgacgc

SEQ ID NO: 2107 - RNA, 19 nt, synthetic construct
  source 1..19: mol_type = other RNA
gcgtcagcttcaggtaccc

SEQ ID NO: 2108 - RNA, 19 nt, synthetic construct
  source 1..19: mol_type = other RNA
ggtacctgaagctgacgcc

SEQ ID NO: 2109 - RNA, 19 nt, synthetic construct
  source 1..19: mol_type = other RNA
ggcgtcagcttcaggtacc

SEQ ID NO: 2110 - RNA, 19 nt, synthetic construct
  source 1..19: mol_type = other RNA
gtacctgaagctgacgccc

SEQ ID NO: 2111 - RNA, 19 nt, synthetic construct
  source 1..19: mol_type = other RNA
gggcgtcagcttcaggtac

SEQ ID NO: 2112 - RNA, 19 nt, synthetic construct
  source 1..19: mol_type = other RNA
tacctgaagctgacgccca

SEQ ID NO: 2113 - RNA, 19 nt, synthetic construct
  source 1..19: mol_type = other RNA
tgggcgtcagcttcaggta

SEQ ID NO: 2114 - RNA, 19 nt, synthetic construct
  source 1..19: mol_type = other RNA
acctgaagctgacgcccat

SEQ ID NO: 2115 - RNA, 19 nt, synthetic construct
  source 1..19: mol_type = other RNA
atgggcgtcagcttcaggt

SEQ ID NO: 2116 - RNA, 19 nt, synthetic construct
  source 1..19: mol_type = other RNA
cctgaagctgacgcccatg

SEQ ID NO: 2117 - RNA, 19 nt, synthetic construct
  source 1..19: mol_type = other RNA
catgggcgtcagcttcagg

SEQ ID NO: 2118 - RNA, 19 nt, synthetic construct
  source 1..19: mol_type = other RNA
ctgaagctgacgcccatgt

SEQ ID NO: 2119 - RNA, 19 nt, synthetic construct
  source 1..19: mol_type = other RNA
acatgggcgtcagcttcag

SEQ ID NO: 2120 - RNA, 19 nt, synthetic construct
  source 1..19: mol_type = other RNA
tgaagctgacgcccatgtt

SEQ ID NO: 2121 - RNA, 19 nt, synthetic construct
  source 1..19: mol_type = other RNA
aacatgggcgtcagcttca

SEQ ID NO: 2122 - RNA, 19 nt, synthetic construct
  source 1..19: mol_type = other RNA
gaagctgacgcccatgttt

SEQ ID NO: 2123 - RNA, 19 nt, synthetic construct
  source 1..19: mol_type = other RNA
aaacatgggcgtcagcttc

SEQ ID NO: 2124 - RNA, 19 nt, synthetic construct
  source 1..19: mol_type = other RNA
atgtttctcatggtcatgc

SEQ ID NO: 2125 - RNA, 19 nt, synthetic construct
  source 1..19: mol_type = other RNA
gcatgaccatgagaaacat

SEQ ID NO: 2126 - RNA, 19 nt, synthetic construct
  source 1..19: mol_type = other RNA
tgtttctcatggtcatgcc

SEQ ID NO: 2127 - RNA, 19 nt, synthetic construct
  source 1..19: mol_type = other RNA
ggcatgaccatgagaaaca

SEQ ID NO: 2128 - RNA, 19 nt, synthetic construct
  source 1..19: mol_type = other RNA
gtttctcatggtcatgcca

SEQ ID NO: 2129 - RNA, 19 nt, synthetic construct
  source 1..19: mol_type = other RNA
tggcatgaccatgagaaac

SEQ ID NO: 2130 - RNA, 19 nt, synthetic construct
  source 1..19: mol_type = other RNA
tttctcatggtcatgccag

SEQ ID NO: 2131 - RNA, 19 nt, synthetic construct
  source 1..19: mol_type = other RNA
ctggcatgaccatgagaaa

SEQ ID NO: 2132 - RNA, 19 nt, synthetic construct
  source 1..19: mol_type = other RNA
tgccaggcatgatcagccg

SEQ ID NO: 2133 - RNA, 19 nt, synthetic construct
  source 1..19: mol_type = other RNA
cggctgatcatgcctggca

SEQ ID NO: 2134 - RNA, 19 nt, synthetic construct
  source 1..19: mol_type = other RNA
ccaggcatgatcagccgca

SEQ ID NO: 2135 - RNA, 19 nt, synthetic construct
  source 1..19: mol_type = other RNA
tgcggctgatcatgcctgg

SEQ ID NO: 2136 - RNA, 19 nt, synthetic construct
  source 1..19: mol_type = other RNA
caggcatgatcagccgcat

SEQ ID NO: 2137 - RNA, 19 nt, synthetic construct
  source 1..19: mol_type = other RNA
atgcggctgatcatgcctg

SEQ ID NO: 2138 - RNA, 19 nt, synthetic construct
  source 1..19: mol_type = other RNA
aggcatgatcagccgcatt

SEQ ID NO: 2139 - RNA, 19 nt, synthetic construct
  source 1..19: mol_type = other RNA
aatgcggctgatcatgcct

SEQ ID NO: 2140 - RNA, 19 nt, synthetic construct
  source 1..19: mol_type = other RNA
ggcatgatcagccgcattc

SEQ ID NO: 2141 - RNA, 19 nt, synthetic construct
  source 1..19: mol_type = other RNA
gaatgcggctgatcatgcc

SEQ ID NO: 2142 - RNA, 19 nt, synthetic construct
  source 1..19: mol_type = other RNA
gcatgatcagccgcattct

SEQ ID NO: 2143 - RNA, 19 nt, synthetic construct
  source 1..19: mol_type = other RNA
agaatgcggctgatcatgc

SEQ ID NO: 2144 - RNA, 19 nt, synthetic construct
  source 1..19: mol_type = other RNA
catgatcagccgcattctg

SEQ ID NO: 2145 - RNA, 19 nt, synthetic construct
  source 1..19: mol_type = other RNA
cagaatgcggctgatcatg

SEQ ID NO: 2146 - RNA, 19 nt, synthetic construct
  source 1..19: mol_type = other RNA
tgatcagccgcattctgta

SEQ ID NO: 2147 - RNA, 19 nt, synthetic construct
  source 1..19: mol_type = other RNA
tacagaatgcggctgatca

SEQ ID NO: 2148 - RNA, 19 nt, synthetic construct
  source 1..19: mol_type = other RNA
atcagccgcattctgtacc

SEQ ID NO: 2149 - RNA, 19 nt, synthetic construct
  source 1..19: mol_type = other RNA
ggtacagaatgcggctgat

SEQ ID NO: 2150 - RNA, 19 nt, synthetic construct
  source 1..19: mol_type = other RNA
agccgcattctgtacccag

SEQ ID NO: 2151 - RNA, 19 nt, synthetic construct
  source 1..19: mol_type = other RNA
ctgggtacagaatgcggct

SEQ ID NO: 2152 - RNA, 19 nt, synthetic construct
  source 1..19: mol_type = other RNA
ctgtacccagacgaggtgg

SEQ ID NO: 2153 - RNA, 19 nt, synthetic construct
  source 1..19: mol_type = other RNA
ccacctcgtctgggtacag

SEQ ID NO: 2154 - RNA, 19 nt, synthetic construct
  source 1..19: mol_type = other RNA
tgtacccagacgaggtggc

SEQ ID NO: 2155 - RNA, 19 nt, synthetic construct
  source 1..19: mol_type = other RNA
gccacctcgtctgggtaca

SEQ ID NO: 2156 - RNA, 19 nt, synthetic construct
  source 1..19: mol_type = other RNA
tacccagacgaggtggcgt

SEQ ID NO: 2157 - RNA, 19 nt, synthetic construct
  source 1..19: mol_type = other RNA
acgccacctcgtctgggta

SEQ ID NO: 2158 - RNA, 19 nt, synthetic construct
  source 1..19: mol_type = other RNA
tgcgtggtgcctgaggtgt

SEQ ID NO: 2159 - RNA, 19 nt, synthetic construct
  source 1..19: mol_type = other RNA
acacctcaggcaccacgca

SEQ ID NO: 2160 - RNA, 19 nt, synthetic construct
  source 1..19: mol_type = other RNA
gtggtgcctgaggtgtgca

SEQ ID NO: 2161 - RNA, 19 nt, synthetic construct
  source 1..19: mol_type = other RNA
tgcacacctcaggcaccac

SEQ ID NO: 2162 - RNA, 19 nt, synthetic construct
  source 1..19: mol_type = other RNA
gctcgtcgtgaagctcatg

SEQ ID NO: 2163 - RNA, 19 nt, synthetic construct
  source 1..19: mol_type = other RNA
catgagcttcacgacgagc

SEQ ID NO: 2164 - RNA, 19 nt, synthetic construct
  source 1..19: mol_type = other RNA
ctcgtcgtgaagctcatgc

SEQ ID NO: 2165 - RNA, 19 nt, synthetic construct
  source 1..19: mol_type = other RNA
gcatgagcttcacgacgag

SEQ ID NO: 2166 - RNA, 19 nt, synthetic construct
  source 1..19: mol_type = other RNA
tcgtcgtgaagctcatgcc

SEQ ID NO: 2167 - RNA, 19 nt, synthetic construct
  source 1..19: mol_type = other RNA
ggcatgagcttcacgacga

SEQ ID NO: 2168 - RNA, 19 nt, synthetic construct
  source 1..19: mol_type = other RNA
cgtcgtgaagctcatgccc

SEQ ID NO: 2169 - RNA, 19 nt, synthetic construct
  source 1..19: mol_type = other RNA
gggcatgagcttcacgacg

SEQ ID NO: 2170 - RNA, 19 nt, synthetic construct
  source 1..19: mol_type = other RNA
gtcgtgaagctcatgccca

SEQ ID NO: 2171 - RNA, 19 nt, synthetic construct
  source 1..19: mol_type = other RNA
tgggcatgagcttcacgac

SEQ ID NO: 2172 - RNA, 19 nt, synthetic construct
  source 1..19: mol_type = other RNA
tcgtgaagctcatgcccaa

SEQ ID NO: 2173 - RNA, 19 nt, synthetic construct
  source 1..19: mol_type = other RNA
ttgggcatgagcttcacga

SEQ ID NO: 2174 - RNA, 19 nt, synthetic construct
  source 1..19: mol_type = other RNA
cgtgaagctcatgcccaac

SEQ ID NO: 2175 - RNA, 19 nt, synthetic construct
  source 1..19: mol_type = other RNA
gttgggcatgagcttcacg

SEQ ID NO: 2176 - RNA, 19 nt, synthetic construct
  source 1..19: mol_type = other RNA
gtgaagctcatgcccaacg

SEQ ID NO: 2177 - RNA, 19 nt, synthetic construct
  source 1..19: mol_type = other RNA
cgttgggcatgagcttcac

SEQ ID NO: 2178 - RNA, 19 nt, synthetic construct
  source 1..19: mol_type = other RNA
tgaagctcatgcccaacgg

SEQ ID NO: 2179 - RNA, 19 nt, synthetic construct
  source 1..19: mol_type = other RNA
ccgttgggcatgagcttca

SEQ ID NO: 2180 - RNA, 19 nt, synthetic construct
  source 1..19: mol_type = other RNA
gaagctcatgcccaacggt

SEQ ID NO: 2181 - RNA, 19 nt, synthetic construct
  source 1..19: mol_type = other RNA
accgttgggcatgagcttc

SEQ ID NO: 2182 - RNA, 19 nt, synthetic construct
  source 1..19: mol_type = other RNA
aagctcatgcccaacggtc

SEQ ID NO: 2183 - RNA, 19 nt, synthetic construct
  source 1..19: mol_type = other RNA
gaccgttgggcatgagctt

SEQ ID NO: 2184 - RNA, 19 nt, synthetic construct
  source 1..19: mol_type = other RNA
agctcatgcccaacggtct

SEQ ID NO: 2185 - RNA, 19 nt, synthetic construct
  source 1..19: mol_type = other RNA
agaccgttgggcatgagct

SEQ ID NO: 2186 - RNA, 19 nt, synthetic construct
  source 1..19: mol_type = other RNA
gctcatgcccaacggtctg

SEQ ID NO: 2187 - RNA, 19 nt, synthetic construct
  source 1..19: mol_type = other RNA
cagaccgttgggcatgagc

SEQ ID NO: 2188 - RNA, 19 nt, synthetic construct
  source 1..19: mol_type = other RNA
ctcatgcccaacggtctgc

SEQ ID NO: 2189 - RNA, 19 nt, synthetic construct
  source 1..19: mol_type = other RNA
gcagaccgttgggcatgag

SEQ ID NO: 2190 - RNA, 19 nt, synthetic construct
  source 1..19: mol_type = other RNA
tcatgcccaacggtctgcg

SEQ ID NO: 2191 - RNA, 19 nt, synthetic construct
  source 1..19: mol_type = other RNA
cgcagaccgttgggcatga

SEQ ID NO: 2192 - RNA, 19 nt, synthetic construct
  source 1..19: mol_type = other RNA
ggactcatgctggcggtca

SEQ ID NO: 2193 - RNA, 19 nt, synthetic construct
  source 1..19: mol_type = other RNA
tgaccgccagcatgagtcc

SEQ ID NO: 2194 - RNA, 19 nt, synthetic construct
  source 1..19: mol_type = other RNA
gactcatgctggcggtcat

SEQ ID NO: 2195 - RNA, 19 nt, synthetic construct
  source 1..19: mol_type = other RNA
atgaccgccagcatgagtc

SEQ ID NO: 2196 - RNA, 19 nt, synthetic construct
  source 1..19: mol_type = other RNA
ctcatgtcctcgctggcct

SEQ ID NO: 2197 - RNA, 19 nt, synthetic construct
  source 1..19: mol_type = other RNA
aggccagcgaggacatgag

SEQ ID NO: 2198 - RNA, 19 nt, synthetic construct
  source 1..19: mol_type = other RNA
tcatgtcctcgctggcctc

SEQ ID NO: 2199 - RNA, 19 nt, synthetic construct
  source 1..19: mol_type = other RNA
gaggccagcgaggacatga

SEQ ID NO: 2200 - RNA, 19 nt, synthetic construct
  source 1..19: mol_type = other RNA
cctcgctggcctccatctt

SEQ ID NO: 2201 - RNA, 19 nt, synthetic construct
  source 1..19: mol_type = other RNA
aagatggaggccagcgagg

SEQ ID NO: 2202 - RNA, 19 nt, synthetic construct
  source 1..19: mol_type = other RNA
ctcgctggcctccatcttc

SEQ ID NO: 2203 - RNA, 19 nt, synthetic construct
  source 1..19: mol_type = other RNA
gaagatggaggccagcgag

SEQ ID NO: 2204 - RNA, 19 nt, synthetic construct
  source 1..19: mol_type = other RNA
acagcagcagcacgctctt

SEQ ID NO: 2205 - RNA, 19 nt, synthetic construct
  source 1..19: mol_type = other RNA
aagagcgtgctgctgctgt

SEQ ID NO: 2206 - RNA, 19 nt, synthetic construct
  source 1..19: mol_type = other RNA
cagcagcagcacgctcttc

SEQ ID NO: 2207 - RNA, 19 nt, synthetic construct
  source 1..19: mol_type = other RNA
gaagagcgtgctgctgctg

SEQ ID NO: 2208 - RNA, 19 nt, synthetic construct
  source 1..19: mol_type = other RNA
agcagcacgctcttcacca

SEQ ID NO: 2209 - RNA, 19 nt, synthetic construct
  source 1..19: mol_type = other RNA
tggtgaagagcgtgctgct

SEQ ID NO: 2210 - RNA, 19 nt, synthetic construct
  source 1..19: mol_type = other RNA
gcagcacgctcttcaccat

SEQ ID NO: 2211 - RNA, 19 nt, synthetic construct
  source 1..19: mol_type = other RNA
atggtgaagagcgtgctgc

SEQ ID NO: 2212 - RNA, 19 nt, synthetic construct
  source 1..19: mol_type = other RNA
cagcacgctcttcaccatg

SEQ ID NO: 2213 - RNA, 19 nt, synthetic construct
  source 1..19: mol_type = other RNA
catggtgaagagcgtgctg

SEQ ID NO: 2214 - RNA, 19 nt, synthetic construct
  source 1..19: mol_type = other RNA
agcacgctcttcaccatgg

SEQ ID NO: 2215 - RNA, 19 nt, synthetic construct
  source 1..19: mol_type = other RNA
ccatggtgaagagcgtgct

SEQ ID NO: 2216 - RNA, 19 nt, synthetic construct
  source 1..19: mol_type = other RNA
gcacgctcttcaccatgga

SEQ ID NO: 2217 - RNA, 19 nt, synthetic construct
  source 1..19: mol_type = other RNA
tccatggtgaagagcgtgc

SEQ ID NO: 2218 - RNA, 19 nt, synthetic construct
  source 1..19: mol_type = other RNA
cgctcttcaccatggacat

SEQ ID NO: 2219 - RNA, 19 nt, synthetic construct
  source 1..19: mol_type = other RNA
atgtccatggtgaagagcg

SEQ ID NO: 2220 - RNA, 19 nt, synthetic construct
  source 1..19: mol_type = other RNA
caccatggacatctacacg

SEQ ID NO: 2221 - RNA, 19 nt, synthetic construct
  source 1..19: mol_type = other RNA
cgtgtagatgtccatggtg

SEQ ID NO: 2222 - RNA, 19 nt, synthetic construct
  source 1..19: mol_type = other RNA
accatggacatctacacgc

SEQ ID NO: 2223 - RNA, 19 nt, synthetic construct
  source 1..19: mol_type = other RNA
gcgtgtagatgtccatggt

SEQ ID NO: 2224 - RNA, 19 nt, synthetic construct
  source 1..19: mol_type = other RNA
ccatggacatctacacgcg

SEQ ID NO: 2225 - RNA, 19 nt, synthetic construct
  source 1..19: mol_type = other RNA
cgcgtgtagatgtccatgg

SEQ ID NO: 2226 - RNA, 19 nt, synthetic construct
  source 1..19: mol_type = other RNA
catggacatctacacgcgc

SEQ ID NO: 2227 - RNA, 19 nt, synthetic construct
  source 1..19: mol_type = other RNA
gcgcgtgtagatgtccatg

SEQ ID NO: 2228 - RNA, 19 nt, synthetic construct
  source 1..19: mol_type = other RNA
gacggctctgggtggtgtt

SEQ ID NO: 2229 - RNA, 19 nt, synthetic construct
  source 1..19: mol_type = other RNA
aacaccacccagagccgtc

SEQ ID NO: 2230 - RNA, 19 nt, synthetic construct
  source 1..19: mol_type = other RNA
acggctctgggtggtgttc

SEQ ID NO: 2231 - RNA, 19 nt, synthetic construct
  source 1..19: mol_type = other RNA
gaacaccacccagagccgt

SEQ ID NO: 2232 - RNA, 19 nt, synthetic construct
  source 1..19: mol_type = other RNA
tcgtggtagtgtcggtggc

SEQ ID NO: 2233 - RNA, 19 nt, synthetic construct
  source 1..19: mol_type = other RNA
gccaccgacactaccacga

SEQ ID NO: 2234 - RNA, 19 nt, synthetic construct
  source 1..19: mol_type = other RNA
gtggtagtgtcggtggcct

SEQ ID NO: 2235 - RNA, 19 nt, synthetic construct
  source 1..19: mol_type = other RNA
aggccaccgacactaccac

SEQ ID NO: 2236 - RNA, 19 nt, synthetic construct
  source 1..19: mol_type = other RNA
tggtagtgtcggtggcctg

SEQ ID NO: 2237 - RNA, 19 nt, synthetic construct
  source 1..19: mol_type = other RNA
caggccaccgacactacca

SEQ ID NO: 2238 - RNA, 19 nt, synthetic construct
  source 1..19: mol_type = other RNA
tagtgtcggtggcctggct

SEQ ID NO: 2239 - RNA, 19 nt, synthetic construct
  source 1..19: mol_type = other RNA
agccaggccaccgacacta

SEQ ID NO: 2240 - RNA, 19 nt, synthetic construct
  source 1..19: mol_type = other RNA
agtgtcggtggcctggctt

SEQ ID NO: 2241 - RNA, 19 nt, synthetic construct
  source 1..19: mol_type = other RNA
aagccaggccaccgacact

SEQ ID NO: 2242 - RNA, 19 nt, synthetic construct
  source 1..19: mol_type = other RNA
cgggcagctcttcgattac

SEQ ID NO: 2243 - RNA, 19 nt, synthetic construct
  source 1..19: mol_type = other RNA
gtaatcgaagagctgcccg

SEQ ID NO: 2244 - RNA, 19 nt, synthetic construct
  source 1..19: mol_type = other RNA
gggcagctcttcgattaca

SEQ ID NO: 2245 - RNA, 19 nt, synthetic construct
  source 1..19: mol_type = other RNA
tgtaatcgaagagctgccc

SEQ ID NO: 2246 - RNA, 19 nt, synthetic construct
  source 1..19: mol_type = other RNA
agctcttcgattacatcca

SEQ ID NO: 2247 - RNA, 19 nt, synthetic construct
  source 1..19: mol_type = other RNA
tggatgtaatcgaagagct

SEQ ID NO: 2248 - RNA, 19 nt, synthetic construct
  source 1..19: mol_type = other RNA
gctcttcgattacatccag

SEQ ID NO: 2249 - RNA, 19 nt, synthetic construct
  source 1..19: mol_type = other RNA
ctggatgtaatcgaagagc

SEQ ID NO: 2250 - RNA, 19 nt, synthetic construct
  source 1..19: mol_type = other RNA
tcttcgattacatccaggc

SEQ ID NO: 2251 - RNA, 19 nt, synthetic construct
  source 1..19: mol_type = other RNA
gcctggatgtaatcgaaga

SEQ ID NO: 2252 - RNA, 19 nt, synthetic construct
  source 1..19: mol_type = other RNA
cgattacatccaggcagtc

SEQ ID NO: 2253 - RNA, 19 nt, synthetic construct
  source 1..19: mol_type = other RNA
gactgcctggatgtaatcg

SEQ ID NO: 2254 - RNA, 19 nt, synthetic construct
  source 1..19: mol_type = other RNA
tacatccaggcagtctcta

SEQ ID NO: 2255 - RNA, 19 nt, synthetic construct
  source 1..19: mol_type = other RNA
tagagactgcctggatgta

SEQ ID NO: 2256 - RNA, 19 nt, synthetic construct
  source 1..19: mol_type = other RNA
acatccaggcagtctctag

SEQ ID NO: 2257 - RNA, 19 nt, synthetic construct
  source 1..19: mol_type = other RNA
ctagagactgcctggatgt

SEQ ID NO: 2258 - RNA, 19 nt, synthetic construct
  source 1..19: mol_type = other RNA
catccaggcagtctctagc

SEQ ID NO: 2259 - RNA, 19 nt, synthetic construct
  source 1..19: mol_type = other RNA
gctagagactgcctggatg

SEQ ID NO: 2260 - RNA, 19 nt, synthetic construct
  source 1..19: mol_type = other RNA
atccaggcagtctctagct

SEQ ID NO: 2261 - RNA, 19 nt, synthetic construct
  source 1..19: mol_type = other RNA
agctagagactgcctggat

SEQ ID NO: 2262 - RNA, 19 nt, synthetic construct
  source 1..19: mol_type = other RNA
tccaggcagtctctagcta

SEQ ID NO: 2263 - RNA, 19 nt, synthetic construct
  source 1..19: mol_type = other RNA
tagctagagactgcctgga

SEQ ID NO: 2264 - RNA, 19 nt, synthetic construct
  source 1..19: mol_type = other RNA
ccaggcagtctctagctac

SEQ ID NO: 2265 - RNA, 19 nt, synthetic construct
  source 1..19: mol_type = other RNA
gtagctagagactgcctgg

SEQ ID NO: 2266 - RNA, 19 nt, synthetic construct
  source 1..19: mol_type = other RNA
caggcagtctctagctacc

SEQ ID NO: 2267 - RNA, 19 nt, synthetic construct
  source 1..19: mol_type = other RNA
ggtagctagagactgcctg

SEQ ID NO: 2268 - RNA, 19 nt, synthetic construct
  source 1..19: mol_type = other RNA
cagtctctagctacctggc

SEQ ID NO: 2269 - RNA, 19 nt, synthetic construct
  source 1..19: mol_type = other RNA
gccaggtagctagagactg

SEQ ID NO: 2270 - RNA, 19 nt, synthetic construct
  source 1..19: mol_type = other RNA
agtctctagctacctggca

SEQ ID NO: 2271 - RNA, 19 nt, synthetic construct
  source 1..19: mol_type = other RNA
tgccaggtagctagagact

SEQ ID NO: 2272 - RNA, 19 nt, synthetic construct
  source 1..19: mol_type = other RNA
gtctctagctacctggcac

SEQ ID NO: 2273 - RNA, 19 nt, synthetic construct
  source 1..19: mol_type = other RNA
gtgccaggtagctagagac

SEQ ID NO: 2274 - RNA, 19 nt, synthetic construct
  source 1..19: mol_type = other RNA
tctctagctacctggcacc

SEQ ID NO: 2275 - RNA, 19 nt, synthetic construct
  source 1..19: mol_type = other RNA
ggtgccaggtagctagaga

SEQ ID NO: 2276 - RNA, 19 nt, synthetic construct
  source 1..19: mol_type = other RNA
ctctagctacctggcaccg

SEQ ID NO: 2277 - RNA, 19 nt, synthetic construct
  source 1..19: mol_type = other RNA
cggtgccaggtagctagag

SEQ ID NO: 2278 - RNA, 19 nt, synthetic construct
  source 1..19: mol_type = other RNA
tctagctacctggcaccgc

SEQ ID NO: 2279 - RNA, 19 nt, synthetic construct
  source 1..19: mol_type = other RNA
gcggtgccaggtagctaga

SEQ ID NO: 2280 - RNA, 19 nt, synthetic construct
  source 1..19: mol_type = other RNA
cttcgtgctggcgctcttc

SEQ ID NO: 2281 - RNA, 19 nt, synthetic construct
  source 1..19: mol_type = other RNA
gaagagcgccagcacgaag

SEQ ID NO: 2282 - RNA, 19 nt, synthetic construct
  source 1..19: mol_type = other RNA
ttcgtgctggcgctcttcg

SEQ ID NO: 2283 - RNA, 19 nt, synthetic construct
  source 1..19: mol_type = other RNA
cgaagagcgccagcacgaa

SEQ ID NO: 2284 - RNA, 19 nt, synthetic construct
  source 1..19: mol_type = other RNA
tcgtgctggcgctcttcgt

SEQ ID NO: 2285 - RNA, 19 nt, synthetic construct
  source 1..19: mol_type = other RNA
acgaagagcgccagcacga

SEQ ID NO: 2286 - RNA, 19 nt, synthetic construct
  source 1..19: mol_type = other RNA
cacgcctgattcccgagtt

SEQ ID NO: 2287 - RNA, 19 nt, synthetic construct
  source 1..19: mol_type = other RNA
aactcgggaatcaggcgtg

SEQ ID NO: 2288 - RNA, 19 nt, synthetic construct
  source 1..19: mol_type = other RNA
acgcctgattcccgagttc

SEQ ID NO: 2289 - RNA, 19 nt, synthetic construct
  source 1..19: mol_type = other RNA
gaactcgggaatcaggcgt

SEQ ID NO: 2290 - RNA, 19 nt, synthetic construct
  source 1..19: mol_type = other RNA
cgcctgattcccgagttct

SEQ ID NO: 2291 - RNA, 19 nt, synthetic construct
  source 1..19: mol_type = other RNA
agaactcgggaatcaggcg

SEQ ID NO: 2292 - RNA, 19 nt, synthetic construct
  source 1..19: mol_type = other RNA
tgattcccgagttctcctt

SEQ ID NO: 2293 - RNA, 19 nt, synthetic construct
  source 1..19: mol_type = other RNA
aaggagaactcgggaatca

SEQ ID NO: 2294 - RNA, 19 nt, synthetic construct
  source 1..19: mol_type = other RNA
gattcccgagttctccttc

SEQ ID NO: 2295 - RNA, 19 nt, synthetic construct
  source 1..19: mol_type = other RNA
gaaggagaactcgggaatc

SEQ ID NO: 2296 - RNA, 19 nt, synthetic construct
  source 1..19: mol_type = other RNA
attcccgagttctccttcg

SEQ ID NO: 2297 - RNA, 19 nt, synthetic construct
  source 1..19: mol_type = other RNA
cgaaggagaactcgggaat

SEQ ID NO: 2298 - RNA, 19 nt, synthetic construct
  source 1..19: mol_type = other RNA
gagttctccttcggctcgg

SEQ ID NO: 2299 - RNA, 19 nt, synthetic construct
  source 1..19: mol_type = other RNA
ccgagccgaaggagaactc

SEQ ID NO: 2300 - RNA, 19 nt, synthetic construct
  source 1..19: mol_type = other RNA
agttctccttcggctcggg

SEQ ID NO: 2301 - RNA, 19 nt, synthetic construct
  source 1..19: mol_type = other RNA
cccgagccgaaggagaact

SEQ ID NO: 2302 - RNA, 19 nt, synthetic construct
  source 1..19: mol_type = other RNA
ttctccttcggctcgggca

SEQ ID NO: 2303 - RNA, 19 nt, synthetic construct
  source 1..19: mol_type = other RNA
tgcccgagccgaaggagaa

SEQ ID NO: 2304 - RNA, 19 nt, synthetic construct
  source 1..19: mol_type = other RNA
tgcactacctctacttcgc

SEQ ID NO: 2305 - RNA, 19 nt, synthetic construct
  source 1..19: mol_type = other RNA
gcgaagtagaggtagtgca

SEQ ID NO: 2306 - RNA, 19 nt, synthetic construct
  source 1..19: mol_type = other RNA
gcactacctctacttcgcc

SEQ ID NO: 2307 - RNA, 19 nt, synthetic construct
  source 1..19: mol_type = other RNA
ggcgaagtagaggtagtgc

SEQ ID NO: 2308 - RNA, 19 nt, synthetic construct
  source 1..19: mol_type = other RNA
cactacctctacttcgcca

SEQ ID NO: 2309 - RNA, 19 nt, synthetic construct
  source 1..19: mol_type = other RNA
tggcgaagtagaggtagtg

SEQ ID NO: 2310 - RNA, 19 nt, synthetic construct
  source 1..19: mol_type = other RNA
acctctacttcgccattgt

SEQ ID NO: 2311 - RNA, 19 nt, synthetic construct
  source 1..19: mol_type = other RNA
acaatggcgaagtagaggt

SEQ ID NO: 2312 - RNA, 19 nt, synthetic construct
  source 1..19: mol_type = other RNA
cctctacttcgccattgtg

SEQ ID NO: 2313 - RNA, 19 nt, synthetic construct
  source 1..19: mol_type = other RNA
cacaatggcgaagtagagg

SEQ ID NO: 2314 - RNA, 19 nt, synthetic construct
  source 1..19: mol_type = other RNA
ctctacttcgccattgtgc

SEQ ID NO: 2315 - RNA, 19 nt, synthetic construct
  source 1..19: mol_type = other RNA
gcacaatggcgaagtagag

SEQ ID NO: 2316 - RNA, 19 nt, synthetic construct
  source 1..19: mol_type = other RNA
tctacttcgccattgtgct

SEQ ID NO: 2317 - RNA, 19 nt, synthetic construct
  source 1..19: mol_type = other RNA
agcacaatggcgaagtaga

SEQ ID NO: 2318 - RNA, 19 nt, synthetic construct
  source 1..19: mol_type = other RNA
cttcgccattgtgctgttc

SEQ ID NO: 2319 - RNA, 19 nt, synthetic construct
  source 1..19: mol_type = other RNA
gaacagcacaatggcgaag

SEQ ID NO: 2320 - RNA, 19 nt, synthetic construct
  source 1..19: mol_type = other RNA
ttcgccattgtgctgttct

SEQ ID NO: 2321 - RNA, 19 nt, synthetic construct
  source 1..19: mol_type = other RNA
agaacagcacaatggcgaa

SEQ ID NO: 2322 - RNA, 19 nt, synthetic construct
  source 1..19: mol_type = other RNA
tcgccattgtgctgttctt

SEQ ID NO: 2323 - RNA, 19 nt, synthetic construct
  source 1..19: mol_type = other RNA
aagaacagcacaatggcga

SEQ ID NO: 2324 - RNA, 19 nt, synthetic construct
  source 1..19: mol_type = other RNA
cgccattgtgctgttcttc

SEQ ID NO: 2325 - RNA, 19 nt, synthetic construct
  source 1..19: mol_type = other RNA
gaagaacagcacaatggcg

SEQ ID NO: 2326 - RNA, 19 nt, synthetic construct
  source 1..19: mol_type = other RNA
gccattgtgctgttcttct

SEQ ID NO: 2327 - RNA, 19 nt, synthetic construct
  source 1..19: mol_type = other RNA
agaagaacagcacaatggc

SEQ ID NO: 2328 - RNA, 19 nt, synthetic construct
  source 1..19: mol_type = other RNA
ccattgtgctgttcttctg

SEQ ID NO: 2329 - RNA, 19 nt, synthetic construct
  source 1..19: mol_type = other RNA
cagaagaacagcacaatgg

SEQ ID NO: 2330 - RNA, 19 nt, synthetic construct
  source 1..19: mol_type = other RNA
cattgtgctgttcttctgc

SEQ ID NO: 2331 - RNA, 19 nt, synthetic construct
  source 1..19: mol_type = other RNA
gcagaagaacagcacaatg

SEQ ID NO: 2332 - RNA, 19 nt, synthetic construct
  source 1..19: mol_type = other RNA
attgtgctgttcttctgct

SEQ ID NO: 2333 - RNA, 19 nt, synthetic construct
  source 1..19: mol_type = other RNA
agcagaagaacagcacaat

SEQ ID NO: 2334 - RNA, 19 nt, synthetic construct
  source 1..19: mol_type = other RNA
gtgctgttcttctgctctg

SEQ ID NO: 2335 - RNA, 19 nt, synthetic construct
  source 1..19: mol_type = other RNA
cagagcagaagaacagcac

SEQ ID NO: 2336 - RNA, 19 nt, synthetic construct
  source 1..19: mol_type = other RNA
tgctgttcttctgctctgg

SEQ ID NO: 2337 - RNA, 19 nt, synthetic construct
  source 1..19: mol_type = other RNA
ccagagcagaagaacagca

SEQ ID NO: 2338 - RNA, 19 nt, synthetic construct
  source 1..19: mol_type = other RNA
gttcttctgctctggcctc

SEQ ID NO: 2339 - RNA, 19 nt, synthetic construct
  source 1..19: mol_type = other RNA
gaggccagagcagaagaac

SEQ ID NO: 2340 - RNA, 19 nt, synthetic construct
  source 1..19: mol_type = other RNA
aaagcacctccaccgcctg

SEQ ID NO: 2341 - RNA, 19 nt, synthetic construct
  source 1..19: mol_type = other RNA
caggcggtggaggtgcttt

SEQ ID NO: 2342 - RNA, 19 nt, synthetic construct
  source 1..19: mol_type = other RNA
acctccaccgcctggtctt

SEQ ID NO: 2343 - RNA, 19 nt, synthetic construct
  source 1..19: mol_type = other RNA
aagaccaggcggtggaggt

SEQ ID NO: 2344 - RNA, 19 nt, synthetic construct
  source 1..19: mol_type = other RNA
caccgcctggtcttcagtc

SEQ ID NO: 2345 - RNA, 19 nt, synthetic construct
  source 1..19: mol_type = other RNA
gactgaagaccaggcggtg

SEQ ID NO: 2346 - RNA, 19 nt, synthetic construct
  source 1..19: mol_type = other RNA
tggtcttcagtctccggca

SEQ ID NO: 2347 - RNA, 19 nt, synthetic construct
  source 1..19: mol_type = other RNA
tgccggagactgaagacca

SEQ ID NO: 2348 - RNA, 19 nt, synthetic construct
  source 1..19: mol_type = other RNA
ggtcttcagtctccggcat

SEQ ID NO: 2349 - RNA, 19 nt, synthetic construct
  source 1..19: mol_type = other RNA
atgccggagactgaagacc

SEQ ID NO: 2350 - RNA, 19 nt, synthetic construct
  source 1..19: mol_type = other RNA
gtcttcagtctccggcata

SEQ ID NO: 2351 - RNA, 19 nt, synthetic construct
  source 1..19: mol_type = other RNA
tatgccggagactgaagac

SEQ ID NO: 2352 - RNA, 19 nt, synthetic construct
  source 1..19: mol_type = other RNA
tcttcagtctccggcatag

SEQ ID NO: 2353 - RNA, 19 nt, synthetic construct
  source 1..19: mol_type = other RNA
ctatgccggagactgaaga

SEQ ID NO: 2354 - RNA, 19 nt, synthetic construct
  source 1..19: mol_type = other RNA
cagtctccggcatagcaag

SEQ ID NO: 2355 - RNA, 19 nt, synthetic construct
  source 1..19: mol_type = other RNA
cttgctatgccggagactg

SEQ ID NO: 2356 - RNA, 19 nt, synthetic construct
  source 1..19: mol_type = other RNA
agtctccggcatagcaagg

SEQ ID NO: 2357 - RNA, 19 nt, synthetic construct
  source 1..19: mol_type = other RNA
ccttgctatgccggagact

SEQ ID NO: 2358 - RNA, 19 nt, synthetic construct
  source 1..19: mol_type = other RNA
gtctccggcatagcaagga

SEQ ID NO: 2359 - RNA, 19 nt, synthetic construct
  source 1..19: mol_type = other RNA
tccttgctatgccggagac

SEQ ID NO: 2360 - RNA, 19 nt, synthetic construct
  source 1..19: mol_type = other RNA
tccggcatagcaaggagga

SEQ ID NO: 2361 - RNA, 19 nt, synthetic construct
  source 1..19: mol_type = other RNA
tcctccttgctatgccgga

SEQ ID NO: 2362 - RNA, 19 nt, synthetic construct
  source 1..19: mol_type = other RNA
gggaggacctggatgctga

SEQ ID NO: 2363 - RNA, 19 nt, synthetic construct
  source 1..19: mol_type = other RNA
tcagcatccaggtcctccc

SEQ ID NO: 2364 - RNA, 19 nt, synthetic construct
  source 1..19: mol_type = other RNA
ggacctggatgctgatgag

SEQ ID NO: 2365 - RNA, 19 nt, synthetic construct
  source 1..19: mol_type = other RNA
ctcatcagcatccaggtcc

SEQ ID NO: 2366 - RNA, 19 nt, synthetic construct
  source 1..19: mol_type = other RNA
gcagcaaggctcctcactc

SEQ ID NO: 2367 - RNA, 19 nt, synthetic construct
  source 1..19: mol_type = other RNA
gagtgaggagccttgctgc

SEQ ID NO: 2368 - RNA, 19 nt, synthetic construct
  source 1..19: mol_type = other RNA
caaggctcctcactccctg

SEQ ID NO: 2369 - RNA, 19 nt, synthetic construct
  source 1..19: mol_type = other RNA
cagggagtgaggagccttg

SEQ ID NO: 2370 - RNA, 19 nt, synthetic construct
  source 1..19: mol_type = other RNA
aaggctcctcactccctgt

SEQ ID NO: 2371 - RNA, 19 nt, synthetic construct
  source 1..19: mol_type = other RNA
acagggagtgaggagcctt

SEQ ID NO: 2372 - RNA, 19 nt, synthetic construct
  source 1..19: mol_type = other RNA
ggctcctcactccctgtac

SEQ ID NO: 2373 - RNA, 19 nt, synthetic construct
  source 1..19: mol_type = other RNA
gtacagggagtgaggagcc

SEQ ID NO: 2374 - RNA, 19 nt, synthetic construct
  source 1..19: mol_type = other RNA
cctcactccctgtacagaa

SEQ ID NO: 2375 - RNA, 19 nt, synthetic construct
  source 1..19: mol_type = other RNA
ttctgtacagggagtgagg

SEQ ID NO: 2376 - RNA, 19 nt, synthetic construct
  source 1..19: mol_type = other RNA
ctcactccctgtacagaat

SEQ ID NO: 2377 - RNA, 19 nt, synthetic construct
  source 1..19: mol_type = other RNA
attctgtacagggagtgag

SEQ ID NO: 2378 - RNA, 19 nt, synthetic construct
  source 1..19: mol_type = other RNA
tcactccctgtacagaatg

SEQ ID NO: 2379 - RNA, 19 nt, synthetic construct
  source 1..19: mol_type = other RNA
cattctgtacagggagtga

SEQ ID NO: 2380 - RNA, 19 nt, synthetic construct
  source 1..19: mol_type = other RNA
cactccctgtacagaatgg

SEQ ID NO: 2381 - RNA, 19 nt, synthetic construct
  source 1..19: mol_type = other RNA
ccattctgtacagggagtg

SEQ ID NO: 2382 - RNA, 19 nt, synthetic construct
  source 1..19: mol_type = other RNA
actccctgtacagaatggg

SEQ ID NO: 2383 - RNA, 19 nt, synthetic construct
  source 1..19: mol_type = other RNA
cccattctgtacagggagt

SEQ ID NO: 2384 - RNA, 19 nt, synthetic construct
  source 1..19: mol_type = other RNA
ctccctgtacagaatgggt

SEQ ID NO: 2385 - RNA, 19 nt, synthetic construct
  source 1..19: mol_type = other RNA
acccattctgtacagggag

SEQ ID NO: 2386 - RNA, 19 nt, synthetic construct
  source 1..19: mol_type = other RNA
tccctgtacagaatgggtg

SEQ ID NO: 2387 - RNA, 19 nt, synthetic construct
  source 1..19: mol_type = other RNA
cacccattctgtacaggga

SEQ ID NO: 2388 - RNA, 19 nt, synthetic construct
  source 1..19: mol_type = other RNA
ccctgtacagaatgggtgc

SEQ ID NO: 2389 - RNA, 19 nt, synthetic construct
  source 1..19: mol_type = other RNA
gcacccattctgtacaggg

SEQ ID NO: 2390 - RNA, 19 nt, synthetic construct
  source 1..19: mol_type = other RNA
cctgtacagaatgggtgcc

SEQ ID NO: 2391 - RNA, 19 nt, synthetic construct
  source 1..19: mol_type = other RNA
ggcacccattctgtacagg

SEQ ID NO: 2392 - RNA, 19 nt, synthetic construct
  source 1..19: mol_type = other RNA
ctgtacagaatgggtgccc

SEQ ID NO: 2393 - RNA, 19 nt, synthetic construct
  source 1..19: mol_type = other RNA
gggcacccattctgtacag

SEQ ID NO: 2394 - RNA, 19 nt, synthetic construct
  source 1..19: mol_type = other RNA
tgtacagaatgggtgccca

SEQ ID NO: 2395 - RNA, 19 nt, synthetic construct
  source 1..19: mol_type = other RNA
tgggcacccattctgtaca

SEQ ID NO: 2396 - RNA, 19 nt, synthetic construct
  source 1..19: mol_type = other RNA
gtacagaatgggtgcccag

SEQ ID NO: 2397 - RNA, 19 nt, synthetic construct
  source 1..19: mol_type = other RNA
ctgggcacccattctgtac

SEQ ID NO: 2398 - RNA, 19 nt, synthetic construct
  source 1..19: mol_type = other RNA
tacagaatgggtgcccaga

SEQ ID NO: 2399 - RNA, 19 nt, synthetic construct
  source 1..19: mol_type = other RNA
tctgggcacccattctgta

SEQ ID NO: 2400 - RNA, 19 nt, synthetic construct
  source 1..19: mol_type = other RNA
tcttccgccagtgcctgct

SEQ ID NO: 2401 - RNA, 19 nt, synthetic construct
  source 1..19: mol_type = other RNA
agcaggcactggcggaaga

SEQ ID NO: 2402 - RNA, 19 nt, synthetic construct
  source 1..19: mol_type = other RNA
ttccgccagtgcctgctct

SEQ ID NO: 2403 - RNA, 19 nt, synthetic construct
  source 1..19: mol_type = other RNA
agagcaggcactggcggaa

SEQ ID NO: 2404 - RNA, 19 nt, synthetic construct
  source 1..19: mol_type = other RNA
cagtgcctgctctggtttt

SEQ ID NO: 2405 - RNA, 19 nt, synthetic construct
  source 1..19: mol_type = other RNA
aaaaccagagcaggcactg

SEQ ID NO: 2406 - RNA, 19 nt, synthetic construct
  source 1..19: mol_type = other RNA
agtgcctgctctggttttg

SEQ ID NO: 2407 - RNA, 19 nt, synthetic construct
  source 1..19: mol_type = other RNA
caaaaccagagcaggcact

SEQ ID NO: 2408 - RNA, 19 nt, synthetic construct
  source 1..19: mol_type = other RNA
gtgcctgctctggttttgt

SEQ ID NO: 2409 - RNA, 19 nt, synthetic construct
  source 1..19: mol_type = other RNA
acaaaaccagagcaggcac

SEQ ID NO: 2410 - RNA, 19 nt, synthetic construct
  source 1..19: mol_type = other RNA
tgcctgctctggttttgtg

SEQ ID NO: 2411 - RNA, 19 nt, synthetic construct
  source 1..19: mol_type = other RNA
cacaaaaccagagcaggca

SEQ ID NO: 2412 - RNA, 19 nt, synthetic construct
  source 1..19: mol_type = other RNA
gcctgctctggttttgtgg

SEQ ID NO: 2413 - RNA, 19 nt, synthetic construct
  source 1..19: mol_type = other RNA
ccacaaaaccagagcaggc

SEQ ID NO: 2414 - RNA, 19 nt, synthetic construct
  source 1..19: mol_type = other RNA
ctgctctggttttgtggaa

SEQ ID NO: 2415 - RNA, 19 nt, synthetic construct
  source 1..19: mol_type = other RNA
ttccacaaaaccagagcag

SEQ ID NO: 2416 - RNA, 19 nt, synthetic construct
  source 1..19: mol_type = other RNA
tgctctggttttgtggaat

SEQ ID NO: 2417 - RNA, 19 nt, synthetic construct
  source 1..19: mol_type = other RNA
attccacaaaaccagagca

SEQ ID NO: 2418 - RNA, 19 nt, synthetic construct
  source 1..19: mol_type = other RNA
gctctggttttgtggaatg

SEQ ID NO: 2419 - RNA, 19 nt, synthetic construct
  source 1..19: mol_type = other RNA
cattccacaaaaccagagc

SEQ ID NO: 2420 - RNA, 19 nt, synthetic construct
  source 1..19: mol_type = other RNA
gttttgtggaatgagcaga

SEQ ID NO: 2421 - RNA, 19 nt, synthetic construct
  source 1..19: mol_type = other RNA
tctgctcattccacaaaac

SEQ ID NO: 2422 - RNA, 19 nt, synthetic construct
  source 1..19: mol_type = other RNA
ttttgtggaatgagcagag

SEQ ID NO: 2423 - RNA, 19 nt, synthetic construct
  source 1..19: mol_type = other RNA
ctctgctcattccacaaaa

SEQ ID NO: 2424 - RNA, 19 nt, synthetic construct
  source 1..19: mol_type = other RNA
tttgtggaatgagcagagg

SEQ ID NO: 2425 - RNA, 19 nt, synthetic construct
  source 1..19: mol_type = other RNA
cctctgctcattccacaaa

SEQ ID NO: 2426 - RNA, 19 nt, synthetic construct
  source 1..19: mol_type = other RNA
ttgtggaatgagcagaggt

SEQ ID NO: 2427 - RNA, 19 nt, synthetic construct
  source 1..19: mol_type = other RNA
acctctgctcattccacaa

SEQ ID NO: 2428 - RNA, 19 nt, synthetic construct
  source 1..19: mol_type = other RNA
tgtggaatgagcagaggtg

SEQ ID NO: 2429 - RNA, 19 nt, synthetic construct
  source 1..19: mol_type = other RNA
cacctctgctcattccaca

SEQ ID NO: 2430 - RNA, 19 nt, synthetic construct
  source 1..19: mol_type = other RNA
gtggaatgagcagaggtgg

SEQ ID NO: 2431 - RNA, 19 nt, synthetic construct
  source 1..19: mol_type = other RNA
ccacctctgctcattccac

SEQ ID NO: 2432 - RNA, 19 nt, synthetic construct
  source 1..19: mol_type = other RNA
tggaatgagcagaggtggg

SEQ ID NO: 2433 - RNA, 19 nt, synthetic construct
  source 1..19: mol_type = other RNA
cccacctctgctcattcca

SEQ ID NO: 2434 - RNA, 19 nt, synthetic construct
  source 1..19: mol_type = other RNA
ctggaggacatcagcgagg

SEQ ID NO: 2435 - RNA, 19 nt, synthetic construct
  source 1..19: mol_type = other RNA
cctcgctgatgtcctccag

SEQ ID NO: 2436 - RNA, 19 nt, synthetic construct
  source 1..19: mol_type = other RNA
tggaggacatcagcgagga

SEQ ID NO: 2437 - RNA, 19 nt, synthetic construct
  source 1..19: mol_type = other RNA
tcctcgctgatgtcctcca

SEQ ID NO: 2438 - RNA, 19 nt, synthetic construct
  source 1..19: mol_type = other RNA
gaggacatcagcgaggacc

SEQ ID NO: 2439 - RNA, 19 nt, synthetic construct
  source 1..19: mol_type = other RNA
ggtcctcgctgatgtcctc

SEQ ID NO: 2440 - RNA, 19 nt, synthetic construct
  source 1..19: mol_type = other RNA
aggacatcagcgaggaccc

SEQ ID NO: 2441 - RNA, 19 nt, synthetic construct
  source 1..19: mol_type = other RNA
gggtcctcgctgatgtcct

SEQ ID NO: 2442 - RNA, 19 nt, synthetic construct
  source 1..19: mol_type = other RNA
gacatcagcgaggacccga

SEQ ID NO: 2443 - RNA, 19 nt, synthetic construct
  source 1..19: mol_type = other RNA
tcgggtcctcgctgatgtc

SEQ ID NO: 2444 - RNA, 19 nt, synthetic construct
  source 1..19: mol_type = other RNA
acatcagcgaggacccgag

SEQ ID NO: 2445 - RNA, 19 nt, synthetic construct
  source 1..19: mol_type = other RNA
ctcgggtcctcgctgatgt

SEQ ID NO: 2446 - RNA, 19 nt, synthetic construct
  source 1..19: mol_type = other RNA
aatgccctgctcatgatgg

SEQ ID NO: 2447 - RNA, 19 nt, synthetic construct
  source 1..19: mol_type = other RNA
ccatcatgagcagggcatt

SEQ ID NO: 2448 - RNA, 19 nt, synthetic construct
  source 1..19: mol_type = other RNA
atgccctgctcatgatggc

SEQ ID NO: 2449 - RNA, 19 nt, synthetic construct
  source 1..19: mol_type = other RNA
gccatcatgagcagggcat

SEQ ID NO: 2450 - RNA, 19 nt, synthetic construct
  source 1..19: mol_type = other RNA
tcatgatggcagtggccgt

SEQ ID NO: 2451 - RNA, 19 nt, synthetic construct
  source 1..19: mol_type = other RNA
acggccactgccatcatga

SEQ ID NO: 2452 - RNA, 19 nt, synthetic construct
  source 1..19: mol_type = other RNA
tgatggcagtggccgtgtt

SEQ ID NO: 2453 - RNA, 19 nt, synthetic construct
  source 1..19: mol_type = other RNA
aacacggccactgccatca

SEQ ID NO: 2454 - RNA, 19 nt, synthetic construct
  source 1..19: mol_type = other RNA
gatggcagtggccgtgttc

SEQ ID NO: 2455 - RNA, 19 nt, synthetic construct
  source 1..19: mol_type = other RNA
gaacacggccactgccatc

SEQ ID NO: 2456 - RNA, 19 nt, synthetic construct
  source 1..19: mol_type = other RNA
atggcagtggccgtgttcc

SEQ ID NO: 2457 - RNA, 19 nt, synthetic construct
  source 1..19: mol_type = other RNA
ggaacacggccactgccat

SEQ ID NO: 2458 - RNA, 19 nt, synthetic construct
  source 1..19: mol_type = other RNA
tggcagtggccgtgttcct

SEQ ID NO: 2459 - RNA, 19 nt, synthetic construct
  source 1..19: mol_type = other RNA
aggaacacggccactgcca

SEQ ID NO: 2460 - RNA, 19 nt, synthetic construct
  source 1..19: mol_type = other RNA
gcagtggccgtgttcctct

SEQ ID NO: 2461 - RNA, 19 nt, synthetic construct
  source 1..19: mol_type = other RNA
agaggaacacggccactgc

SEQ ID NO: 2462 - RNA, 19 nt, synthetic construct
  source 1..19: mol_type = other RNA
cagtggccgtgttcctctg

SEQ ID NO: 2463 - RNA, 19 nt, synthetic construct
  source 1..19: mol_type = other RNA
cagaggaacacggccactg

SEQ ID NO: 2464 - RNA, 19 nt, synthetic construct
  source 1..19: mol_type = other RNA
agtggccgtgttcctctgg

SEQ ID NO: 2465 - RNA, 19 nt, synthetic construct
  source 1..19: mol_type = other RNA
ccagaggaacacggccact

SEQ ID NO: 2466 - RNA, 19 nt, synthetic construct
  source 1..19: mol_type = other RNA
aactgcgttggacaccata

SEQ ID NO: 2467 - RNA, 19 nt, synthetic construct
  source 1..19: mol_type = other RNA
tatggtgtccaacgcagtt

SEQ ID NO: 2468 - RNA, 19 nt, synthetic construct
  source 1..19: mol_type = other RNA
actgcgttggacaccataa

SEQ ID NO: 2469 - RNA, 19 nt, synthetic construct
  source 1..19: mol_type = other RNA
ttatggtgtccaacgcagt

SEQ ID NO: 2470 - RNA, 19 nt, synthetic construct
  source 1..19: mol_type = other RNA
ctgcgttggacaccataag

SEQ ID NO: 2471 - RNA, 19 nt, synthetic construct
  source 1..19: mol_type = other RNA
cttatggtgtccaacgcag

SEQ ID NO: 2472 - RNA, 19 nt, synthetic construct
  source 1..19: mol_type = other RNA
tgcgttggacaccataagc

SEQ ID NO: 2473 - RNA, 19 nt, synthetic construct
  source 1..19: mol_type = other RNA
gcttatggtgtccaacgca

SEQ ID NO: 2474 - RNA, 19 nt, synthetic construct
  source 1..19: mol_type = other RNA
gcgttggacaccataagcc

SEQ ID NO: 2475 - RNA, 19 nt, synthetic construct
  source 1..19: mol_type = other RNA
ggcttatggtgtccaacgc

SEQ ID NO: 2476 - RNA, 19 nt, synthetic construct
  source 1..19: mol_type = other RNA
cgttggacaccataagcca

SEQ ID NO: 2477 - RNA, 19 nt, synthetic construct
  source 1..19: mol_type = other RNA
tggcttatggtgtccaacg

SEQ ID NO: 2478 - RNA, 19 nt, synthetic construct
  source 1..19: mol_type = other RNA
gttggacaccataagccac

SEQ ID NO: 2479 - RNA, 19 nt, synthetic construct
  source 1..19: mol_type = other RNA
gtggcttatggtgtccaac

SEQ ID NO: 2480 - RNA, 19 nt, synthetic construct
  source 1..19: mol_type = other RNA
ttggacaccataagccaca

SEQ ID NO: 2481 - RNA, 19 nt, synthetic construct
  source 1..19: mol_type = other RNA
tgtggcttatggtgtccaa

SEQ ID NO: 2482 - RNA, 19 nt, synthetic construct
  source 1..19: mol_type = other RNA
cataagccacagcctcaca

SEQ ID NO: 2483 - RNA, 19 nt, synthetic construct
  source 1..19: mol_type = other RNA
tgtgaggctgtggcttatg

SEQ ID NO: 2484 - RNA, 19 nt, synthetic construct
  source 1..19: mol_type = other RNA
ataagccacagcctcacag

SEQ ID NO: 2485 - RNA, 19 nt, synthetic construct
  source 1..19: mol_type = other RNA
ctgtgaggctgtggcttat

SEQ ID NO: 2486 - RNA, 19 nt, synthetic construct
  source 1..19: mol_type = other RNA
ccacagcctcacaggaagt

SEQ ID NO: 2487 - RNA, 19 nt, synthetic construct
  source 1..19: mol_type = other RNA
acttcctgtgaggctgtgg

SEQ ID NO: 2488 - RNA, 19 nt, synthetic construct
  source 1..19: mol_type = other RNA
cacagcctcacaggaagtg

SEQ ID NO: 2489 - RNA, 19 nt, synthetic construct
  source 1..19: mol_type = other RNA
cacttcctgtgaggctgtg

SEQ ID NO: 2490 - RNA, 19 nt, synthetic construct
  source 1..19: mol_type = other RNA
acagcctcacaggaagtgg

SEQ ID NO: 2491 - RNA, 19 nt, synthetic construct
  source 1..19: mol_type = other RNA
ccacttcctgtgaggctgt

SEQ ID NO: 2492 - RNA, 19 nt, synthetic construct
  source 1..19: mol_type = other RNA
cagcctcacaggaagtggg

SEQ ID NO: 2493 - RNA, 19 nt, synthetic construct
  source 1..19: mol_type = other RNA
cccacttcctgtgaggctg

SEQ ID NO: 2494 - RNA, 19 nt, synthetic construct
  source 1..19: mol_type = other RNA
ggcccactgcatctgattg

SEQ ID NO: 2495 - RNA, 19 nt, synthetic construct
  source 1..19: mol_type = other RNA
caatcagatgcagtgggcc

SEQ ID NO: 2496 - RNA, 19 nt, synthetic construct
  source 1..19: mol_type = other RNA
gcccactgcatctgattgg

SEQ ID NO: 2497 - RNA, 19 nt, synthetic construct
  source 1..19: mol_type = other RNA
ccaatcagatgcagtgggc

SEQ ID NO: 2498 - RNA, 19 nt, synthetic construct
  source 1..19: mol_type = other RNA
cccactgcatctgattggc

SEQ ID NO: 2499 - RNA, 19 nt, synthetic construct
  source 1..19: mol_type = other RNA
gccaatcagatgcagtggg

SEQ ID NO: 2500 - RNA, 19 nt, synthetic construct
  source 1..19: mol_type = other RNA
ccactgcatctgattggca

SEQ ID NO: 2501 - RNA, 19 nt, synthetic construct
  source 1..19: mol_type = other RNA
tgccaatcagatgcagtgg

SEQ ID NO: 2502 - RNA, 19 nt, synthetic construct
  source 1..19: mol_type = other RNA
tgcatctgattggcagtca

SEQ ID NO: 2503 - RNA, 19 nt, synthetic construct
  source 1..19: mol_type = other RNA
tgactgccaatcagatgca

SEQ ID NO: 2504 - RNA, 19 nt, synthetic construct
  source 1..19: mol_type = other RNA
tctgattggcagtcacttc

SEQ ID NO: 2505 - RNA, 19 nt, synthetic construct
  source 1..19: mol_type = other RNA
gaagtgactgccaatcaga

SEQ ID NO: 2506 - RNA, 19 nt, synthetic construct
  source 1..19: mol_type = other RNA
ctgattggcagtcacttcc

SEQ ID NO: 2507 - RNA, 19 nt, synthetic construct
  source 1..19: mol_type = other RNA
ggaagtgactgccaatcag

SEQ ID NO: 2508 - RNA, 19 nt, synthetic construct
  source 1..19: mol_type = other RNA
tgattggcagtcacttccc

SEQ ID NO: 2509 - RNA, 19 nt, synthetic construct
  source 1..19: mol_type = other RNA
gggaagtgactgccaatca

SEQ ID NO: 2510 - RNA, 19 nt, synthetic construct
  source 1..19: mol_type = other RNA
tggcagtcacttcccatga

SEQ ID NO: 2511 - RNA, 19 nt, synthetic construct
  source 1..19: mol_type = other RNA
tcatgggaagtgactgcca

SEQ ID NO: 2512 - RNA, 19 nt, synthetic construct
  source 1..19: mol_type = other RNA
ggcagtcacttcccatgag

SEQ ID NO: 2513 - RNA, 19 nt, synthetic construct
  source 1..19: mol_type = other RNA
ctcatgggaagtgactgcc

SEQ ID NO: 2514 - RNA, 19 nt, synthetic construct
  source 1..19: mol_type = other RNA
cagtcacttcccatgaggg

SEQ ID NO: 2515 - RNA, 19 nt, synthetic construct
  source 1..19: mol_type = other RNA
ccctcatgggaagtgactg

SEQ ID NO: 2516 - RNA, 19 nt, synthetic construct
  source 1..19: mol_type = other RNA
agtcacttcccatgagggc

SEQ ID NO: 2517 - RNA, 19 nt, synthetic construct
  source 1..19: mol_type = other RNA
gccctcatgggaagtgact

SEQ ID NO: 2518 - RNA, 19 nt, synthetic construct
  source 1..19: mol_type = other RNA
gtcacttcccatgagggcc

SEQ ID NO: 2519 - RNA, 19 nt, synthetic construct
  source 1..19: mol_type = other RNA
ggccctcatgggaagtgac

SEQ ID NO: 2520 - RNA, 19 nt, synthetic construct
  source 1..19: mol_type = other RNA
tcacttcccatgagggcct

SEQ ID NO: 2521 - RNA, 19 nt, synthetic construct
  source 1..19: mol_type = other RNA
aggccctcatgggaagtga

SEQ ID NO: 2522 - RNA, 19 nt, synthetic construct
  source 1..19: mol_type = other RNA
cacttcccatgagggcctg

SEQ ID NO: 2523 - RNA, 19 nt, synthetic construct
  source 1..19: mol_type = other RNA
caggccctcatgggaagtg

SEQ ID NO: 2524 - RNA, 19 nt, synthetic construct
  source 1..19: mol_type = other RNA
acttcccatgagggcctgg

SEQ ID NO: 2525 - RNA, 19 nt, synthetic construct
  source 1..19: mol_type = other RNA
ccaggccctcatgggaagt

SEQ ID NO: 2526 - RNA, 19 nt, synthetic construct
  source 1..19: mol_type = other RNA
acccgctgcagttgcccta

SEQ ID NO: 2527 - RNA, 19 nt, synthetic construct
  source 1..19: mol_type = other RNA
tagggcaactgcagcgggt

SEQ ID NO: 2528 - RNA, 19 nt, synthetic construct
  source 1..19: mol_type = other RNA
cccgctgcagttgccctaa

SEQ ID NO: 2529 - RNA, 19 nt, synthetic construct
  source 1..19: mol_type = other RNA
ttagggcaactgcagcggg

SEQ ID NO: 2530 - RNA, 19 nt, synthetic construct
  source 1..19: mol_type = other RNA
ccgctgcagttgccctaag

SEQ ID NO: 2531 - RNA, 19 nt, synthetic construct
  source 1..19: mol_type = other RNA
cttagggcaactgcagcgg

SEQ ID NO: 2532 - RNA, 21 nt, synthetic construct
  source 1..21: mol_type = other RNA
gacatcctagtcattgctgca

SEQ ID NO: 2533 - RNA, 21 nt, synthetic construct
  source 1..21: mol_type = other RNA
tgcagcaatgactaggatgtc

SEQ ID NO: 2534 - RNA, 21 nt, synthetic construct
  source 1..21: mol_type = other RNA
acatcctagtcattgctgcat

SEQ ID NO: 2535 - RNA, 21 nt, synthetic construct
  source 1..21: mol_type = other RNA
atgcagcaatgactaggatgt

SEQ ID NO: 2536 - RNA, 21 nt, synthetic construct
  source 1..21: mol_type = other RNA
catcctagtcattgctgcata

SEQ ID NO: 2537 - RNA, 21 nt, synthetic construct
  source 1..21: mol_type = other RNA
tatgcagcaatgactaggatg

SEQ ID NO: 2538 - RNA, 21 nt, synthetic construct
  source 1..21: mol_type = other RNA
atcctagtcattgctgcatat

SEQ ID NO: 2539 - RNA, 21 nt, synthetic construct
  source 1..21: mol_type = other RNA
atatgcagcaatgactaggat

SEQ ID NO: 2540 - RNA, 21 nt, synthetic construct
  source 1..21: mol_type = other RNA
tcctagtcattgctgcatatt

SEQ ID NO: 2541 - RNA, 21 nt, synthetic construct
  source 1..21: mol_type = other RNA
aatatgcagcaatgactagga

SEQ ID NO: 2542 - RNA, 21 nt, synthetic construct
  source 1..21: mol_type = other RNA
cctagtcattgctgcatattt

SEQ ID NO: 2543 - RNA, 21 nt, synthetic construct
  source 1..21: mol_type = other RNA
aaatatgcagcaatgactagg

SEQ ID NO: 2544 - RNA, 21 nt, synthetic construct
  source 1..21: mol_type = other RNA
ctagtcattgctgcatatttc

SEQ ID NO: 2545 - RNA, 21 nt, synthetic construct
  source 1..21: mol_type = other RNA
gaaatatgcagcaatgactag

SEQ ID NO: 2546 - RNA, 21 nt, synthetic construct
  source 1..21: mol_type = other RNA
tagtcattgctgcatatttcc

SEQ ID NO: 2547 - RNA, 21 nt, synthetic construct
  source 1..21: mol_type = other RNA
ggaaatatgcagcaatgacta

SEQ ID NO: 2548 - RNA, 21 nt, synthetic construct
  source 1..21: mol_type = other RNA
agtcattgctgcatatttcct

SEQ ID NO: 2549 - RNA, 21 nt, synthetic construct
  source 1..21: mol_type = other RNA
aggaaatatgcagcaatgact

SEQ ID NO: 2550 - RNA, 21 nt, synthetic construct
  source 1..21: mol_type = other RNA
gtcattgctgcatatttcctg

SEQ ID NO: 2551 - RNA, 21 nt, synthetic construct
  source 1..21: mol_type = other RNA
caggaaatatgcagcaatgac

SEQ ID NO: 2552 - RNA, 21 nt, synthetic construct
  source 1..21: mol_type = other RNA
tcattgctgcatatttcctgc

SEQ ID NO: 2553 - RNA, 21 nt, synthetic construct
  source 1..21: mol_type = other RNA
gcaggaaatatgcagcaatga

SEQ ID NO: 2554 - RNA, 21 nt, synthetic construct
  source 1..21: mol_type = other RNA
cattgctgcatatttcctgct

SEQ ID NO: 2555 - RNA, 21 nt, synthetic construct
  source 1..21: mol_type = other RNA
agcaggaaatatgcagcaatg

SEQ ID NO: 2556 - RNA, 21 nt, synthetic construct
  source 1..21: mol_type = other RNA
attgctgcatatttcctgctg

SEQ ID NO: 2557 - RNA, 21 nt, synthetic construct
  source 1..21: mol_type = other RNA
cagcaggaaatatgcagcaat

SEQ ID NO: 2558 - RNA, 21 nt, synthetic construct
  source 1..21: mol_type = other RNA
ttgctgcatatttcctgctgg

SEQ ID NO: 2559 - RNA, 21 nt, synthetic construct
  source 1..21: mol_type = other RNA
ccagcaggaaatatgcagcaa

SEQ ID NO: 2560 - RNA, 21 nt, synthetic construct
  source 1..21: mol_type = other RNA
tgctgcatatttcctgctggt

SEQ ID NO: 2561 - RNA, 21 nt, synthetic construct
  source 1..21: mol_type = other RNA
accagcaggaaatatgcagca

SEQ ID NO: 2562 - RNA, 21 nt, synthetic construct
  source 1..21: mol_type = other RNA
gctgcatatttcctgctggtc

SEQ ID NO: 2563 - RNA, 21 nt, synthetic construct
  source 1..21: mol_type = other RNA
gaccagcaggaaatatgcagc

SEQ ID NO: 2564 - RNA, 21 nt, synthetic construct
  source 1..21: mol_type = other RNA
ctgcatatttcctgctggtca

SEQ ID NO: 2565 - RNA, 21 nt, synthetic construct
  source 1..21: mol_type = other RNA
tgaccagcaggaaatatgcag

SEQ ID NO: 2566 - RNA, 21 nt, synthetic construct
  source 1..21: mol_type = other RNA
tgcatatttcctgctggtcat

SEQ ID NO: 2567 - RNA, 21 nt, synthetic construct
  source 1..21: mol_type = other RNA
atgaccagcaggaaatatgca

SEQ ID NO: 2568 - RNA, 21 nt, synthetic construct
  source 1..21: mol_type = other RNA
gcatatttcctgctggtcatt

SEQ ID NO: 2569 - RNA, 21 nt, synthetic construct
  source 1..21: mol_type = other RNA
aatgaccagcaggaaatatgc

SEQ ID NO: 2570 - RNA, 21 nt, synthetic construct
  source 1..21: mol_type = other RNA
catatttcctgctggtcattg

SEQ ID NO: 2571 - RNA, 21 nt, synthetic construct
  source 1..21: mol_type = other RNA
caatgaccagcaggaaatatg

SEQ ID NO: 2572 - RNA, 21 nt, synthetic construct
  source 1..21: mol_type = other RNA
atatttcctgctggtcattgg

SEQ ID NO: 2573 - RNA, 21 nt, synthetic construct
  source 1..21: mol_type = other RNA
ccaatgaccagcaggaaatat

SEQ ID NO: 2574 - RNA, 21 nt, synthetic construct
  source 1..21: mol_type = other RNA
tatttcctgctggtcattggc

SEQ ID NO: 2575 - RNA, 21 nt, synthetic construct
  source 1..21: mol_type = other RNA
gccaatgaccagcaggaaata

SEQ ID NO: 2576 - RNA, 21 nt, synthetic construct
  source 1..21: mol_type = other RNA
atttcctgctggtcattggcg

SEQ ID NO: 2577 - RNA, 21 nt, synthetic construct
  source 1..21: mol_type = other RNA
cgccaatgaccagcaggaaat

SEQ ID NO: 2578 - RNA, 21 nt, synthetic construct
  source 1..21: mol_type = other RNA
tttcctgctggtcattggcgt

SEQ ID NO: 2579 - RNA, 21 nt, synthetic construct
  source 1..21: mol_type = other RNA
acgccaatgaccagcaggaaa

SEQ ID NO: 2580 - RNA, 21 nt, synthetic construct
  source 1..21: mol_type = other RNA
ttcctgctggtcattggcgtt

SEQ ID NO: 2581 - RNA, 21 nt, synthetic construct
  source 1..21: mol_type = other RNA
aacgccaatgaccagcaggaa

SEQ ID NO: 2582 - RNA, 21 nt, synthetic construct
  source 1..21: mol_type = other RNA
tcctgctggtcattggcgttg

SEQ ID NO: 2583 - RNA, 21 nt, synthetic construct
  source 1..21: mol_type = other RNA
caacgccaatgaccagcagga

SEQ ID NO: 2584 - RNA, 21 nt, synthetic construct
  source 1..21: mol_type = other RNA
cctgctggtcattggcgttgg

SEQ ID NO: 2585 - RNA, 21 nt, synthetic construct
  source 1..21: mol_type = other RNA
ccaacgccaatgaccagcagg

SEQ ID NO: 2586 - RNA, 21 nt, synthetic construct
  source 1..21: mol_type = other RNA
ctgctggtcattggcgttggc

SEQ ID NO: 2587 - RNA, 21 nt, synthetic construct
  source 1..21: mol_type = other RNA
gccaacgccaatgaccagcag

SEQ ID NO: 2588 - RNA, 21 nt, synthetic construct
  source 1..21: mol_type = other RNA
tgctggtcattggcgttggct

SEQ ID NO: 2589 - RNA, 21 nt, synthetic construct
  source 1..21: mol_type = other RNA
agccaacgccaatgaccagca

SEQ ID NO: 2590 - RNA, 21 nt, synthetic construct
  source 1..21: mol_type = other RNA
gctggtcattggcgttggctt

SEQ ID NO: 2591 - RNA, 21 nt, synthetic construct
  source 1..21: mol_type = other RNA
aagccaacgccaatgaccagc

SEQ ID NO: 2592 - RNA, 21 nt, synthetic construct
  source 1..21: mol_type = other RNA
ctggtcattggcgttggcttg

SEQ ID NO: 2593 - RNA, 21 nt, synthetic construct
  source 1..21: mol_type = other RNA
caagccaacgccaatgaccag

SEQ ID NO: 2594 - RNA, 21 nt, synthetic construct
  source 1..21: mol_type = other RNA
tggtcattggcgttggcttgt

SEQ ID NO: 2595 - RNA, 21 nt, synthetic construct
  source 1..21: mol_type = other RNA
acaagccaacgccaatgacca

SEQ ID NO: 2596 - RNA, 21 nt, synthetic construct
  source 1..21: mol_type = other RNA
ggtcattggcgttggcttgtg

SEQ ID NO: 2597 - RNA, 21 nt, synthetic construct
  source 1..21: mol_type = other RNA
cacaagccaacgccaatgacc

SEQ ID NO: 2598 - RNA, 21 nt, synthetic construct
  source 1..21: mol_type = other RNA
gtcattggcgttggcttgtgg

SEQ ID NO: 2599 - RNA, 21 nt, synthetic construct
  source 1..21: mol_type = other RNA
ccacaagccaacgccaatgac

SEQ ID NO: 2600 - RNA, 21 nt, synthetic construct
  source 1..21: mol_type = other RNA
tcattggcgttggcttgtggt

SEQ ID NO: 2601 - RNA, 21 nt, synthetic construct
  source 1..21: mol_type = other RNA
accacaagccaacgccaatga

SEQ ID NO: 2602 - RNA, 21 nt, synthetic construct
  source 1..21: mol_type = other RNA
cattggcgttggcttgtggtc

SEQ ID NO: 2603 - RNA, 21 nt, synthetic construct
  source 1..21: mol_type = other RNA
gaccacaagccaacgccaatg

SEQ ID NO: 2604 - RNA, 21 nt, synthetic construct
  source 1..21: mol_type = other RNA
attggcgttggcttgtggtcc

SEQ ID NO: 2605 - RNA, 21 nt, synthetic construct
  source 1..21: mol_type = other RNA
ggaccacaagccaacgccaat

SEQ ID NO: 2606 - RNA, 21 nt, synthetic construct
  source 1..21: mol_type = other RNA
ttggcgttggcttgtggtcca

SEQ ID NO: 2607 - RNA, 21 nt, synthetic construct
  source 1..21: mol_type = other RNA
tggaccacaagccaacgccaa

SEQ ID NO: 2608 - RNA, 21 nt, synthetic construct
  source 1..21: mol_type = other RNA
tggcgttggcttgtggtccat

SEQ ID NO: 2609 - RNA, 21 nt, synthetic construct
  source 1..21: mol_type = other RNA
atggaccacaagccaacgcca

SEQ ID NO: 2610 - RNA, 21 nt, synthetic construct
  source 1..21: mol_type = other RNA
ggcgttggcttgtggtccatg

SEQ ID NO: 2611 - RNA, 21 nt, synthetic construct
  source 1..21: mol_type = other RNA
catggaccacaagccaacgcc

SEQ ID NO: 2612 - RNA, 21 nt, synthetic construct
  source 1..21: mol_type = other RNA
gcgttggcttgtggtccatgt

SEQ ID NO: 2613 - RNA, 21 nt, synthetic construct
  source 1..21: mol_type = other RNA
acatggaccacaagccaacgc

SEQ ID NO: 2614 - RNA, 21 nt, synthetic construct
  source 1..21: mol_type = other RNA
cgttggcttgtggtccatgtg

SEQ ID NO: 2615 - RNA, 21 nt, synthetic construct
  source 1..21: mol_type = other RNA
cacatggaccacaagccaacg

SEQ ID NO: 2616 - RNA, 21 nt, synthetic construct
  source 1..21: mol_type = other RNA
gttggcttgtggtccatgtgc

SEQ ID NO: 2617 - RNA, 21 nt, synthetic construct
  source 1..21: mol_type = other RNA
gcacatggaccacaagccaac

SEQ ID NO: 2618 - RNA, 21 nt, synthetic construct
  source 1..21: mol_type = other RNA
ttggcttgtggtccatgtgca

SEQ ID NO: 2619 - RNA, 21 nt, synthetic construct
  source 1..21: mol_type = other RNA
tgcacatggaccacaagccaa

SEQ ID NO: 2620 - RNA, 21 nt, synthetic construct
  source 1..21: mol_type = other RNA
tggcttgtggtccatgtgcag

SEQ ID NO: 2621 - RNA, 21 nt, synthetic construct
  source 1..21: mol_type = other RNA
ctgcacatggaccacaagcca

SEQ ID NO: 2622 - RNA, 21 nt, synthetic construct
  source 1..21: mol_type = other RNA
ggcttgtggtccatgtgcaga

SEQ ID NO: 2623 - RNA, 21 nt, synthetic construct
  source 1..21: mol_type = other RNA
tctgcacatggaccacaagcc

SEQ ID NO: 2624 - RNA, 21 nt, synthetic construct
  source 1..21: mol_type = other RNA
gcttgtggtccatgtgcagaa

SEQ ID NO: 2625 - RNA, 21 nt, synthetic construct
  source 1..21: mol_type = other RNA
ttctgcacatggaccacaagc

SEQ ID NO: 2626 - RNA, 21 nt, synthetic construct
  source 1..21: mol_type = other RNA
tggcaggacgcagcatggtgt

SEQ ID NO: 2627 - RNA, 21 nt, synthetic construct
  source 1..21: mol_type = other RNA
acaccatgctgcgtcctgcca

SEQ ID NO: 2628 - RNA, 21 nt, synthetic construct
  source 1..21: mol_type = other RNA
caggacgcagcatggtgtggt

SEQ ID NO: 2629 - RNA, 21 nt, synthetic construct
  source 1..21: mol_type = other RNA
accacaccatgctgcgtcctg

SEQ ID NO: 2630 - RNA, 21 nt, synthetic construct
  source 1..21: mol_type = other RNA
aggacgcagcatggtgtggtg

SEQ ID NO: 2631 - RNA, 21 nt, synthetic construct
  source 1..21: mol_type = other RNA
caccacaccatgctgcgtcct

SEQ ID NO: 2632 - RNA, 21 nt, synthetic construct
  source 1..21: mol_type = other RNA
ggcctctctcttcgccagcaa

SEQ ID NO: 2633 - RNA, 21 nt, synthetic construct
  source 1..21: mol_type = other RNA
ttgctggcgaagagagaggcc

SEQ ID NO: 2634 - RNA, 21 nt, synthetic construct
  source 1..21: mol_type = other RNA
gcctctctcttcgccagcaac

SEQ ID NO: 2635 - RNA, 21 nt, synthetic construct
  source 1..21: mol_type = other RNA
gttgctggcgaagagagaggc

SEQ ID NO: 2636 - RNA, 21 nt, synthetic construct
  source 1..21: mol_type = other RNA
actttgtgggcctggcaggga

SEQ ID NO: 2637 - RNA, 21 nt, synthetic construct
  source 1..21: mol_type = other RNA
tccctgccaggcccacaaagt

SEQ ID NO: 2638 - RNA, 21 nt, synthetic construct
  source 1..21: mol_type = other RNA
tttgtgggcctggcagggact

SEQ ID NO: 2639 - RNA, 21 nt, synthetic construct
  source 1..21: mol_type = other RNA
agtccctgccaggcccacaaa

SEQ ID NO: 2640 - RNA, 21 nt, synthetic construct
  source 1..21: mol_type = other RNA
gactggcgctgcaagtggctt

SEQ ID NO: 2641 - RNA, 21 nt, synthetic construct
  source 1..21: mol_type = other RNA
aagccacttgcagcgccagtc

SEQ ID NO: 2642 - RNA, 21 nt, synthetic construct
  source 1..21: mol_type = other RNA
aagtggcttggctgttgctgg

SEQ ID NO: 2643 - RNA, 21 nt, synthetic construct
  source 1..21: mol_type = other RNA
ccagcaacagccaagccactt

SEQ ID NO: 2644 - RNA, 21 nt, synthetic construct
  source 1..21: mol_type = other RNA
agtggcttggctgttgctgga

SEQ ID NO: 2645 - RNA, 21 nt, synthetic construct
  source 1..21: mol_type = other RNA
tccagcaacagccaagccact

SEQ ID NO: 2646 - RNA, 21 nt, synthetic construct
  source 1..21: mol_type = other RNA
gtggcttggctgttgctggat

SEQ ID NO: 2647 - RNA, 21 nt, synthetic construct
  source 1..21: mol_type = other RNA
atccagcaacagccaagccac

SEQ ID NO: 2648 - RNA, 21 nt, synthetic construct
  source 1..21: mol_type = other RNA
tggcttggctgttgctggatt

SEQ ID NO: 2649 - RNA, 21 nt, synthetic construct
  source 1..21: mol_type = other RNA
aatccagcaacagccaagcca

SEQ ID NO: 2650 - RNA, 21 nt, synthetic construct
  source 1..21: mol_type = other RNA
ggcttggctgttgctggattc

SEQ ID NO: 2651 - RNA, 21 nt, synthetic construct
  source 1..21: mol_type = other RNA
gaatccagcaacagccaagcc

SEQ ID NO: 2652 - RNA, 21 nt, synthetic construct
  source 1..21: mol_type = other RNA
gcttggctgttgctggattcg

SEQ ID NO: 2653 - RNA, 21 nt, synthetic construct
  source 1..21: mol_type = other RNA
cgaatccagcaacagccaagc

SEQ ID NO: 2654 - RNA, 21 nt, synthetic construct
  source 1..21: mol_type = other RNA
cttggctgttgctggattcga

SEQ ID NO: 2655 - RNA, 21 nt, synthetic construct
  source 1..21: mol_type = other RNA
tcgaatccagcaacagccaag

SEQ ID NO: 2656 - RNA, 21 nt, synthetic construct
  source 1..21: mol_type = other RNA
ttggctgttgctggattcgag

SEQ ID NO: 2657 - RNA, 21 nt, synthetic construct
  source 1..21: mol_type = other RNA
ctcgaatccagcaacagccaa

SEQ ID NO: 2658 - RNA, 21 nt, synthetic construct
  source 1..21: mol_type = other RNA
tggctgttgctggattcgagt

SEQ ID NO: 2659 - RNA, 21 nt, synthetic construct
  source 1..21: mol_type = other RNA
actcgaatccagcaacagcca

SEQ ID NO: 2660 - RNA, 21 nt, synthetic construct
  source 1..21: mol_type = other RNA
ggctgttgctggattcgagtg

SEQ ID NO: 2661 - RNA, 21 nt, synthetic construct
  source 1..21: mol_type = other RNA
cactcgaatccagcaacagcc

SEQ ID NO: 2662 - RNA, 21 nt, synthetic construct
  source 1..21: mol_type = other RNA
gctgttgctggattcgagtgg

SEQ ID NO: 2663 - RNA, 21 nt, synthetic construct
  source 1..21: mol_type = other RNA
ccactcgaatccagcaacagc

SEQ ID NO: 2664 - RNA, 21 nt, synthetic construct
  source 1..21: mol_type = other RNA
ctgttgctggattcgagtgga

SEQ ID NO: 2665 - RNA, 21 nt, synthetic construct
  source 1..21: mol_type = other RNA
tccactcgaatccagcaacag

SEQ ID NO: 2666 - RNA, 21 nt, synthetic construct
  source 1..21: mol_type = other RNA
tgttgctggattcgagtggaa

SEQ ID NO: 2667 - RNA, 21 nt, synthetic construct
  source 1..21: mol_type = other RNA
ttccactcgaatccagcaaca

SEQ ID NO: 2668 - RNA, 21 nt, synthetic construct
  source 1..21: mol_type = other RNA
ttcgagtggaatgcgctcttc

SEQ ID NO: 2669 - RNA, 21 nt, synthetic construct
  source 1..21: mol_type = other RNA
gaagagcgcattccactcgaa

SEQ ID NO: 2670 - RNA, 21 nt, synthetic construct
  source 1..21: mol_type = other RNA
tcgagtggaatgcgctcttcg

SEQ ID NO: 2671 - RNA, 21 nt, synthetic construct
  source 1..21: mol_type = other RNA
cgaagagcgcattccactcga

SEQ ID NO: 2672 - RNA, 21 nt, synthetic construct
  source 1..21: mol_type = other RNA
cgagtggaatgcgctcttcgt

SEQ ID NO: 2673 - RNA, 21 nt, synthetic construct
  source 1..21: mol_type = other RNA
acgaagagcgcattccactcg

SEQ ID NO: 2674 - RNA, 21 nt, synthetic construct
  source 1..21: mol_type = other RNA
gagtggaatgcgctcttcgtg

SEQ ID NO: 2675 - RNA, 21 nt, synthetic construct
  source 1..21: mol_type = other RNA
cacgaagagcgcattccactc

SEQ ID NO: 2676 - RNA, 21 nt, synthetic construct
  source 1..21: mol_type = other RNA
agtggaatgcgctcttcgtgg

SEQ ID NO: 2677 - RNA, 21 nt, synthetic construct
  source 1..21: mol_type = other RNA
ccacgaagagcgcattccact

SEQ ID NO: 2678 - RNA, 21 nt, synthetic construct
  source 1..21: mol_type = other RNA
gtggaatgcgctcttcgtggt

SEQ ID NO: 2679 - RNA, 21 nt, synthetic construct
  source 1..21: mol_type = other RNA
accacgaagagcgcattccac

SEQ ID NO: 2680 - RNA, 21 nt, synthetic construct
  source 1..21: mol_type = other RNA
tggaatgcgctcttcgtggtg

SEQ ID NO: 2681 - RNA, 21 nt, synthetic construct
  source 1..21: mol_type = other RNA
caccacgaagagcgcattcca

SEQ ID NO: 2682 - RNA, 21 nt, synthetic construct
  source 1..21: mol_type = other RNA
ggaatgcgctcttcgtggtgc

SEQ ID NO: 2683 - RNA, 21 nt, synthetic construct
  source 1..21: mol_type = other RNA
gcaccacgaagagcgcattcc

SEQ ID NO: 2684 - RNA, 21 nt, synthetic construct
  source 1..21: mol_type = other RNA
gaatgcgctcttcgtggtgct

SEQ ID NO: 2685 - RNA, 21 nt, synthetic construct
  source 1..21: mol_type = other RNA
agcaccacgaagagcgcattc

SEQ ID NO: 2686 - RNA, 21 nt, synthetic construct
  source 1..21: mol_type = other RNA
aatgcgctcttcgtggtgctg

SEQ ID NO: 2687 - RNA, 21 nt, synthetic construct
  source 1..21: mol_type = other RNA
cagcaccacgaagagcgcatt

SEQ ID NO: 2688 - RNA, 21 nt, synthetic construct
  source 1..21: mol_type = other RNA
atgcgctcttcgtggtgctgc

SEQ ID NO: 2689 - RNA, 21 nt, synthetic construct
  source 1..21: mol_type = other RNA
gcagcaccacgaagagcgcat

SEQ ID NO: 2690 - RNA, 21 nt, synthetic construct
  source 1..21: mol_type = other RNA
tgcgctcttcgtggtgctgct

SEQ ID NO: 2691 - RNA, 21 nt, synthetic construct
  source 1..21: mol_type = other RNA
agcagcaccacgaagagcgca

SEQ ID NO: 2692 - RNA, 21 nt, synthetic construct
  source 1..21: mol_type = other RNA
gcgctcttcgtggtgctgcta

SEQ ID NO: 2693 - RNA, 21 nt, synthetic construct
  source 1..21: mol_type = other RNA
tagcagcaccacgaagagcgc

SEQ ID NO: 2694 - RNA, 21 nt, synthetic construct
  source 1..21: mol_type = other RNA
cgctcttcgtggtgctgctac

SEQ ID NO: 2695 - RNA, 21 nt, synthetic construct
  source 1..21: mol_type = other RNA
gtagcagcaccacgaagagcg

SEQ ID NO: 2696 - RNA, 21 nt, synthetic construct
  source 1..21: mol_type = other RNA
gctcttcgtggtgctgctact

SEQ ID NO: 2697 - RNA, 21 nt, synthetic construct
  source 1..21: mol_type = other RNA
agtagcagcaccacgaagagc

SEQ ID NO: 2698 - RNA, 21 nt, synthetic construct
  source 1..21: mol_type = other RNA
ctcttcgtggtgctgctactg

SEQ ID NO: 2699 - RNA, 21 nt, synthetic construct
  source 1..21: mol_type = other RNA
cagtagcagcaccacgaagag

SEQ ID NO: 2700 - RNA, 21 nt, synthetic construct
  source 1..21: mol_type = other RNA
tcttcgtggtgctgctactgg

SEQ ID NO: 2701 - RNA, 21 nt, synthetic construct
  source 1..21: mol_type = other RNA
ccagtagcagcaccacgaaga

SEQ ID NO: 2702 - RNA, 21 nt, synthetic construct
  source 1..21: mol_type = other RNA
cttcgtggtgctgctactggg

SEQ ID NO: 2703 - RNA, 21 nt, synthetic construct
  source 1..21: mol_type = other RNA
cccagtagcagcaccacgaag

SEQ ID NO: 2704 - RNA, 21 nt, synthetic construct
  source 1..21: mol_type = other RNA
ttcgtggtgctgctactgggc

SEQ ID NO: 2705 - RNA, 21 nt, synthetic construct
  source 1..21: mol_type = other RNA
gcccagtagcagcaccacgaa

SEQ ID NO: 2706 - RNA, 21 nt, synthetic construct
  source 1..21: mol_type = other RNA
tcgtggtgctgctactgggct

SEQ ID NO: 2707 - RNA, 21 nt, synthetic construct
  source 1..21: mol_type = other RNA
agcccagtagcagcaccacga

SEQ ID NO: 2708 - RNA, 21 nt, synthetic construct
  source 1..21: mol_type = other RNA
gctgctactgggctggctgtt

SEQ ID NO: 2709 - RNA, 21 nt, synthetic construct
  source 1..21: mol_type = other RNA
aacagccagcccagtagcagc

SEQ ID NO: 2710 - RNA, 21 nt, synthetic construct
  source 1..21: mol_type = other RNA
ctgctactgggctggctgttt

SEQ ID NO: 2711 - RNA, 21 nt, synthetic construct
  source 1..21: mol_type = other RNA
aaacagccagcccagtagcag

SEQ ID NO: 2712 - RNA, 21 nt, synthetic construct
  source 1..21: mol_type = other RNA
tgctactgggctggctgtttg

SEQ ID NO: 2713 - RNA, 21 nt, synthetic construct
  source 1..21: mol_type = other RNA
caaacagccagcccagtagca

SEQ ID NO: 2714 - RNA, 21 nt, synthetic construct
  source 1..21: mol_type = other RNA
gctactgggctggctgtttgc

SEQ ID NO: 2715 - RNA, 21 nt, synthetic construct
  source 1..21: mol_type = other RNA
gcaaacagccagcccagtagc

SEQ ID NO: 2716 - RNA, 21 nt, synthetic construct
  source 1..21: mol_type = other RNA
ctactgggctggctgtttgca

SEQ ID NO: 2717 - RNA, 21 nt, synthetic construct
  source 1..21: mol_type = other RNA
tgcaaacagccagcccagtag

SEQ ID NO: 2718 - RNA, 21 nt, synthetic construct
  source 1..21: mol_type = other RNA
tactgggctggctgtttgcac

SEQ ID NO: 2719 - RNA, 21 nt, synthetic construct
  source 1..21: mol_type = other RNA
gtgcaaacagccagcccagta

SEQ ID NO: 2720 - RNA, 21 nt, synthetic construct
  source 1..21: mol_type = other RNA
actgggctggctgtttgcacc

SEQ ID NO: 2721 - RNA, 21 nt, synthetic construct
  source 1..21: mol_type = other RNA
ggtgcaaacagccagcccagt

SEQ ID NO: 2722 - RNA, 21 nt, synthetic construct
  source 1..21: mol_type = other RNA
gctggctgtttgcacccgtgt

SEQ ID NO: 2723 - RNA, 21 nt, synthetic construct
  source 1..21: mol_type = other RNA
acacgggtgcaaacagccagc

SEQ ID NO: 2724 - RNA, 21 nt, synthetic construct
  source 1..21: mol_type = other RNA
ctggctgtttgcacccgtgta

SEQ ID NO: 2725 - RNA, 21 nt, synthetic construct
  source 1..21: mol_type = other RNA
tacacgggtgcaaacagccag

SEQ ID NO: 2726 - RNA, 21 nt, synthetic construct
  source 1..21: mol_type = other RNA
tggctgtttgcacccgtgtac

SEQ ID NO: 2727 - RNA, 21 nt, synthetic construct
  source 1..21: mol_type = other RNA
gtacacgggtgcaaacagcca

SEQ ID NO: 2728 - RNA, 21 nt, synthetic construct
  source 1..21: mol_type = other RNA
ggctgtttgcacccgtgtacc

SEQ ID NO: 2729 - RNA, 21 nt, synthetic construct
  source 1..21: mol_type = other RNA
ggtacacgggtgcaaacagcc

SEQ ID NO: 2730 - RNA, 21 nt, synthetic construct
  source 1..21: mol_type = other RNA
gctgtttgcacccgtgtacct

SEQ ID NO: 2731 - RNA, 21 nt, synthetic construct
  source 1..21: mol_type = other RNA
aggtacacgggtgcaaacagc

SEQ ID NO: 2732 - RNA, 21 nt, synthetic construct
  source 1..21: mol_type = other RNA
ctgtttgcacccgtgtacctg

SEQ ID NO: 2733 - RNA, 21 nt, synthetic construct
  source 1..21: mol_type = other RNA
caggtacacgggtgcaaacag

SEQ ID NO: 2734 - RNA, 21 nt, synthetic construct
  source 1..21: mol_type = other RNA
tgtttgcacccgtgtacctga

SEQ ID NO: 2735 - RNA, 21 nt, synthetic construct
  source 1..21: mol_type = other RNA
tcaggtacacgggtgcaaaca

SEQ ID NO: 2736 - RNA, 21 nt, synthetic construct
  source 1..21: mol_type = other RNA
gtttgcacccgtgtacctgac

SEQ ID NO: 2737 - RNA, 21 nt, synthetic construct
  source 1..21: mol_type = other RNA
gtcaggtacacgggtgcaaac

SEQ ID NO: 2738 - RNA, 21 nt, synthetic construct
  source 1..21: mol_type = other RNA
tttgcacccgtgtacctgaca

SEQ ID NO: 2739 - RNA, 21 nt, synthetic construct
  source 1..21: mol_type = other RNA
tgtcaggtacacgggtgcaaa

SEQ ID NO: 2740 - RNA, 21 nt, synthetic construct
  source 1..21: mol_type = other RNA
ttgcacccgtgtacctgacag

SEQ ID NO: 2741 - RNA, 21 nt, synthetic construct
  source 1..21: mol_type = other RNA
ctgtcaggtacacgggtgcaa

SEQ ID NO: 2742 - RNA, 21 nt, synthetic construct
  source 1..21: mol_type = other RNA
tgcacccgtgtacctgacagc

SEQ ID NO: 2743 - RNA, 21 nt, synthetic construct
  source 1..21: mol_type = other RNA
gctgtcaggtacacgggtgca

SEQ ID NO: 2744 - RNA, 21 nt, synthetic construct
  source 1..21: mol_type = other RNA
ggggtcatcacgatgccacag

SEQ ID NO: 2745 - RNA, 21 nt, synthetic construct
  source 1..21: mol_type = other RNA
ctgtggcatcgtgatgacccc

SEQ ID NO: 2746 - RNA, 21 nt, synthetic construct
  source 1..21: mol_type = other RNA
gggtcatcacgatgccacagt

SEQ ID NO: 2747 - RNA, 21 nt, synthetic construct
  source 1..21: mol_type = other RNA
actgtggcatcgtgatgaccc

SEQ ID NO: 2748 - RNA, 21 nt, synthetic construct
  source 1..21: mol_type = other RNA
ggtcatcacgatgccacagta

SEQ ID NO: 2749 - RNA, 21 nt, synthetic construct
  source 1..21: mol_type = other RNA
tactgtggcatcgtgatgacc

SEQ ID NO: 2750 - RNA, 21 nt, synthetic construct
  source 1..21: mol_type = other RNA
gtcatcacgatgccacagtac

SEQ ID NO: 2751 - RNA, 21 nt, synthetic construct
  source 1..21: mol_type = other RNA
gtactgtggcatcgtgatgac

SEQ ID NO: 2752 - RNA, 21 nt, synthetic construct
  source 1..21: mol_type = other RNA
tcatcacgatgccacagtacc

SEQ ID NO: 2753 - RNA, 21 nt, synthetic construct
  source 1..21: mol_type = other RNA
ggtactgtggcatcgtgatga

SEQ ID NO: 2754 - RNA, 21 nt, synthetic construct
  source 1..21: mol_type = other RNA
catcacgatgccacagtacct

SEQ ID NO: 2755 - RNA, 21 nt, synthetic construct
  source 1..21: mol_type = other RNA
aggtactgtggcatcgtgatg

SEQ ID NO: 2756 - RNA, 21 nt, synthetic construct
  source 1..21: mol_type = other RNA
atcacgatgccacagtacctg

SEQ ID NO: 2757 - RNA, 21 nt, synthetic construct
  source 1..21: mol_type = other RNA
caggtactgtggcatcgtgat

SEQ ID NO: 2758 - RNA, 21 nt, synthetic construct
  source 1..21: mol_type = other RNA
tcacgatgccacagtacctgc

SEQ ID NO: 2759 - RNA, 21 nt, synthetic construct
  source 1..21: mol_type = other RNA
gcaggtactgtggcatcgtga

SEQ ID NO: 2760 - RNA, 21 nt, synthetic construct
  source 1..21: mol_type = other RNA
cacgatgccacagtacctgcg

SEQ ID NO: 2761 - RNA, 21 nt, synthetic construct
  source 1..21: mol_type = other RNA
cgcaggtactgtggcatcgtg

SEQ ID NO: 2762 - RNA, 21 nt, synthetic construct
  source 1..21: mol_type = other RNA
acgatgccacagtacctgcgc

SEQ ID NO: 2763 - RNA, 21 nt, synthetic construct
  source 1..21: mol_type = other RNA
gcgcaggtactgtggcatcgt

SEQ ID NO: 2764 - RNA, 21 nt, synthetic construct
  source 1..21: mol_type = other RNA
cgatgccacagtacctgcgca

SEQ ID NO: 2765 - RNA, 21 nt, synthetic construct
  source 1..21: mol_type = other RNA
tgcgcaggtactgtggcatcg

SEQ ID NO: 2766 - RNA, 21 nt, synthetic construct
  source 1..21: mol_type = other RNA
gatgccacagtacctgcgcaa

SEQ ID NO: 2767 - RNA, 21 nt, synthetic construct
  source 1..21: mol_type = other RNA
ttgcgcaggtactgtggcatc

SEQ ID NO: 2768 - RNA, 21 nt, synthetic construct
  source 1..21: mol_type = other RNA
atgccacagtacctgcgcaag

SEQ ID NO: 2769 - RNA, 21 nt, synthetic construct
  source 1..21: mol_type = other RNA
cttgcgcaggtactgtggcat

SEQ ID NO: 2770 - RNA, 21 nt, synthetic construct
  source 1..21: mol_type = other RNA
tgccacagtacctgcgcaagc

SEQ ID NO: 2771 - RNA, 21 nt, synthetic construct
  source 1..21: mol_type = other RNA
gcttgcgcaggtactgtggca

SEQ ID NO: 2772 - RNA, 21 nt, synthetic construct
  source 1..21: mol_type = other RNA
cacagtacctgcgcaagcgct

SEQ ID NO: 2773 - RNA, 21 nt, synthetic construct
  source 1..21: mol_type = other RNA
agcgcttgcgcaggtactgtg

SEQ ID NO: 2774 - RNA, 21 nt, synthetic construct
  source 1..21: mol_type = other RNA
acagtacctgcgcaagcgctt

SEQ ID NO: 2775 - RNA, 21 nt, synthetic construct
  source 1..21: mol_type = other RNA
aagcgcttgcgcaggtactgt

SEQ ID NO: 2776 - RNA, 21 nt, synthetic construct
  source 1..21: mol_type = other RNA
cagtacctgcgcaagcgcttc

SEQ ID NO: 2777 - RNA, 21 nt, synthetic construct
  source 1..21: mol_type = other RNA
gaagcgcttgcgcaggtactg

SEQ ID NO: 2778 - RNA, 21 nt, synthetic construct
  source 1..21: mol_type = other RNA
agtacctgcgcaagcgcttcg

SEQ ID NO: 2779 - RNA, 21 nt, synthetic construct
  source 1..21: mol_type = other RNA
cgaagcgcttgcgcaggtact

SEQ ID NO: 2780 - RNA, 21 nt, synthetic construct
  source 1..21: mol_type = other RNA
cgcatccgcctctacctgtct

SEQ ID NO: 2781 - RNA, 21 nt, synthetic construct
  source 1..21: mol_type = other RNA
agacaggtagaggcggatgcg

SEQ ID NO: 2782 - RNA, 21 nt, synthetic construct
  source 1..21: mol_type = other RNA
gcatccgcctctacctgtctg

SEQ ID NO: 2783 - RNA, 21 nt, synthetic construct
  source 1..21: mol_type = other RNA
cagacaggtagaggcggatgc

SEQ ID NO: 2784 - RNA, 21 nt, synthetic construct
  source 1..21: mol_type = other RNA
catccgcctctacctgtctgt

SEQ ID NO: 2785 - RNA, 21 nt, synthetic construct
  source 1..21: mol_type = other RNA
acagacaggtagaggcggatg

SEQ ID NO: 2786 - RNA, 21 nt, synthetic construct
  source 1..21: mol_type = other RNA
atccgcctctacctgtctgtg

SEQ ID NO: 2787 - RNA, 21 nt, synthetic construct
  source 1..21: mol_type = other RNA
cacagacaggtagaggcggat

SEQ ID NO: 2788 - RNA, 21 nt, synthetic construct
  source 1..21: mol_type = other RNA
tccgcctctacctgtctgtgc

SEQ ID NO: 2789 - RNA, 21 nt, synthetic construct
  source 1..21: mol_type = other RNA
gcacagacaggtagaggcgga

SEQ ID NO: 2790 - RNA, 21 nt, synthetic construct
  source 1..21: mol_type = other RNA
ccgcctctacctgtctgtgct

SEQ ID NO: 2791 - RNA, 21 nt, synthetic construct
  source 1..21: mol_type = other RNA
agcacagacaggtagaggcgg

SEQ ID NO: 2792 - RNA, 21 nt, synthetic construct
  source 1..21: mol_type = other RNA
cgcctctacctgtctgtgctc

SEQ ID NO: 2793 - RNA, 21 nt, synthetic construct
  source 1..21: mol_type = other RNA
gagcacagacaggtagaggcg

SEQ ID NO: 2794 - RNA, 21 nt, synthetic construct
  source 1..21: mol_type = other RNA
gcctctacctgtctgtgctct

SEQ ID NO: 2795 - RNA, 21 nt, synthetic construct
  source 1..21: mol_type = other RNA
agagcacagacaggtagaggc

SEQ ID NO: 2796 - RNA, 21 nt, synthetic construct
  source 1..21: mol_type = other RNA
cctctacctgtctgtgctctc

SEQ ID NO: 2797 - RNA, 21 nt, synthetic construct
  source 1..21: mol_type = other RNA
gagagcacagacaggtagagg

SEQ ID NO: 2798 - RNA, 21 nt, synthetic construct
  source 1..21: mol_type = other RNA
ctctacctgtctgtgctctcc

SEQ ID NO: 2799 - RNA, 21 nt, synthetic construct
  source 1..21: mol_type = other RNA
ggagagcacagacaggtagag

SEQ ID NO: 2800 - RNA, 21 nt, synthetic construct
  source 1..21: mol_type = other RNA
tctacctgtctgtgctctccc

SEQ ID NO: 2801 - RNA, 21 nt, synthetic construct
  source 1..21: mol_type = other RNA
gggagagcacagacaggtaga

SEQ ID NO: 2802 - RNA, 21 nt, synthetic construct
  source 1..21: mol_type = other RNA
ctacctgtctgtgctctccct

SEQ ID NO: 2803 - RNA, 21 nt, synthetic construct
  source 1..21: mol_type = other RNA
agggagagcacagacaggtag

SEQ ID NO: 2804 - RNA, 21 nt, synthetic construct
  source 1..21: mol_type = other RNA
tacctgtctgtgctctccctt

SEQ ID NO: 2805 - RNA, 21 nt, synthetic construct
  source 1..21: mol_type = other RNA
aagggagagcacagacaggta

SEQ ID NO: 2806 - RNA, 21 nt, synthetic construct
  source 1..21: mol_type = other RNA
acctgtctgtgctctcccttt

SEQ ID NO: 2807 - RNA, 21 nt, synthetic construct
  source 1..21: mol_type = other RNA
aaagggagagcacagacaggt

SEQ ID NO: 2808 - RNA, 21 nt, synthetic construct
  source 1..21: mol_type = other RNA
cctgtctgtgctctccctttt

SEQ ID NO: 2809 - RNA, 21 nt, synthetic construct
  source 1..21: mol_type = other RNA
aaaagggagagcacagacagg

SEQ ID NO: 2810 - RNA, 21 nt, synthetic construct
  source 1..21: mol_type = other RNA
ctgtctgtgctctcccttttc

SEQ ID NO: 2811 - RNA, 21 nt, synthetic construct
  source 1..21: mol_type = other RNA
gaaaagggagagcacagacag

SEQ ID NO: 2812 - RNA, 21 nt, synthetic construct
  source 1..21: mol_type = other RNA
tgtctgtgctctcccttttcc

SEQ ID NO: 2813 - RNA, 21 nt, synthetic construct
  source 1..21: mol_type = other RNA
ggaaaagggagagcacagaca

SEQ ID NO: 2814 - RNA, 21 nt, synthetic construct
  source 1..21: mol_type = other RNA
tgtgctctcccttttcctgta

SEQ ID NO: 2815 - RNA, 21 nt, synthetic construct
  source 1..21: mol_type = other RNA
tacaggaaaagggagagcaca

SEQ ID NO: 2816 - RNA, 21 nt, synthetic construct
  source 1..21: mol_type = other RNA
gtgctctcccttttcctgtac

SEQ ID NO: 2817 - RNA, 21 nt, synthetic construct
  source 1..21: mol_type = other RNA
gtacaggaaaagggagagcac

SEQ ID NO: 2818 - RNA, 21 nt, synthetic construct
  source 1..21: mol_type = other RNA
tgctctcccttttcctgtaca

SEQ ID NO: 2819 - RNA, 21 nt, synthetic construct
  source 1..21: mol_type = other RNA
tgtacaggaaaagggagagca

SEQ ID NO: 2820 - RNA, 21 nt, synthetic construct
  source 1..21: mol_type = other RNA
gctctcccttttcctgtacat

SEQ ID NO: 2821 - RNA, 21 nt, synthetic construct
  source 1..21: mol_type = other RNA
atgtacaggaaaagggagagc

SEQ ID NO: 2822 - RNA, 21 nt, synthetic construct
  source 1..21: mol_type = other RNA
ctctcccttttcctgtacatc

SEQ ID NO: 2823 - RNA, 21 nt, synthetic construct
  source 1..21: mol_type = other RNA
gatgtacaggaaaagggagag

SEQ ID NO: 2824 - RNA, 21 nt, synthetic construct
  source 1..21: mol_type = other RNA
tctcccttttcctgtacatct

SEQ ID NO: 2825 - RNA, 21 nt, synthetic construct
  source 1..21: mol_type = other RNA
agatgtacaggaaaagggaga

SEQ ID NO: 2826 - RNA, 21 nt, synthetic construct
  source 1..21: mol_type = other RNA
ctcccttttcctgtacatctt

SEQ ID NO: 2827 - RNA, 21 nt, synthetic construct
  source 1..21: mol_type = other RNA
aagatgtacaggaaaagggag

SEQ ID NO: 2828 - RNA, 21 nt, synthetic construct
  source 1..21: mol_type = other RNA
tcccttttcctgtacatcttc

SEQ ID NO: 2829 - RNA, 21 nt, synthetic construct
  source 1..21: mol_type = other RNA
gaagatgtacaggaaaaggga

SEQ ID NO: 2830 - RNA, 21 nt, synthetic construct
  source 1..21: mol_type = other RNA
cttttcctgtacatcttcacc

SEQ ID NO: 2831 - RNA, 21 nt, synthetic construct
  source 1..21: mol_type = other RNA
ggtgaagatgtacaggaaaag

SEQ ID NO: 2832 - RNA, 21 nt, synthetic construct
  source 1..21: mol_type = other RNA
ttttcctgtacatcttcacca

SEQ ID NO: 2833 - RNA, 21 nt, synthetic construct
  source 1..21: mol_type = other RNA
tggtgaagatgtacaggaaaa

SEQ ID NO: 2834 - RNA, 21 nt, synthetic construct
  source 1..21: mol_type = other RNA
tttcctgtacatcttcaccaa

SEQ ID NO: 2835 - RNA, 21 nt, synthetic construct
  source 1..21: mol_type = other RNA
ttggtgaagatgtacaggaaa

SEQ ID NO: 2836 - RNA, 21 nt, synthetic construct
  source 1..21: mol_type = other RNA
ttcctgtacatcttcaccaag

SEQ ID NO: 2837 - RNA, 21 nt, synthetic construct
  source 1..21: mol_type = other RNA
cttggtgaagatgtacaggaa

SEQ ID NO: 2838 - RNA, 21 nt, synthetic construct
  source 1..21: mol_type = other RNA
cttcaccaagatctcagtgga

SEQ ID NO: 2839 - RNA, 21 nt, synthetic construct
  source 1..21: mol_type = other RNA
tccactgagatcttggtgaag

SEQ ID NO: 2840 - RNA, 21 nt, synthetic construct
  source 1..21: mol_type = other RNA
ttcaccaagatctcagtggac

SEQ ID NO: 2841 - RNA, 21 nt, synthetic construct
  source 1..21: mol_type = other RNA
gtccactgagatcttggtgaa

SEQ ID NO: 2842 - RNA, 21 nt, synthetic construct
  source 1..21: mol_type = other RNA
tcaccaagatctcagtggaca

SEQ ID NO: 2843 - RNA, 21 nt, synthetic construct
  source 1..21: mol_type = other RNA
tgtccactgagatcttggtga

SEQ ID NO: 2844 - RNA, 21 nt, synthetic construct
  source 1..21: mol_type = other RNA
caccaagatctcagtggacat

SEQ ID NO: 2845 - RNA, 21 nt, synthetic construct
  source 1..21: mol_type = other RNA
atgtccactgagatcttggtg

SEQ ID NO: 2846 - RNA, 21 nt, synthetic construct
  source 1..21: mol_type = other RNA
accaagatctcagtggacatg

SEQ ID NO: 2847 - RNA, 21 nt, synthetic construct
  source 1..21: mol_type = other RNA
catgtccactgagatcttggt

SEQ ID NO: 2848 - RNA, 21 nt, synthetic construct
  source 1..21: mol_type = other RNA
ccaagatctcagtggacatgt

SEQ ID NO: 2849 - RNA, 21 nt, synthetic construct
  source 1..21: mol_type = other RNA
acatgtccactgagatcttgg

SEQ ID NO: 2850 - RNA, 21 nt, synthetic construct
  source 1..21: mol_type = other RNA
caagatctcagtggacatgtt

SEQ ID NO: 2851 - RNA, 21 nt, synthetic construct
  source 1..21: mol_type = other RNA
aacatgtccactgagatcttg

SEQ ID NO: 2852 - RNA, 21 nt, synthetic construct
  source 1..21: mol_type = other RNA
aagatctcagtggacatgttc

SEQ ID NO: 2853 - RNA, 21 nt, synthetic construct
  source 1..21: mol_type = other RNA
gaacatgtccactgagatctt

SEQ ID NO: 2854 - RNA, 21 nt, synthetic construct
  source 1..21: mol_type = other RNA
agatctcagtggacatgttct

SEQ ID NO: 2855 - RNA, 21 nt, synthetic construct
  source 1..21: mol_type = other RNA
agaacatgtccactgagatct

SEQ ID NO: 2856 - RNA, 21 nt, synthetic construct
  source 1..21: mol_type = other RNA
gatctcagtggacatgttctc

SEQ ID NO: 2857 - RNA, 21 nt, synthetic construct
  source 1..21: mol_type = other RNA
gagaacatgtccactgagatc

SEQ ID NO: 2858 - RNA, 21 nt, synthetic construct
  source 1..21: mol_type = other RNA
atctcagtggacatgttctcc

SEQ ID NO: 2859 - RNA, 21 nt, synthetic construct
  source 1..21: mol_type = other RNA
ggagaacatgtccactgagat

SEQ ID NO: 2860 - RNA, 21 nt, synthetic construct
  source 1..21: mol_type = other RNA
tctcagtggacatgttctccg

SEQ ID NO: 2861 - RNA, 21 nt, synthetic construct
  source 1..21: mol_type = other RNA
cggagaacatgtccactgaga

SEQ ID NO: 2862 - RNA, 21 nt, synthetic construct
  source 1..21: mol_type = other RNA
ctcagtggacatgttctccgg

SEQ ID NO: 2863 - RNA, 21 nt, synthetic construct
  source 1..21: mol_type = other RNA
ccggagaacatgtccactgag

SEQ ID NO: 2864 - RNA, 21 nt, synthetic construct
  source 1..21: mol_type = other RNA
tcagtggacatgttctccgga

SEQ ID NO: 2865 - RNA, 21 nt, synthetic construct
  source 1..21: mol_type = other RNA
tccggagaacatgtccactga

SEQ ID NO: 2866 - RNA, 21 nt, synthetic construct
  source 1..21: mol_type = other RNA
cagtggacatgttctccggag

SEQ ID NO: 2867 - RNA, 21 nt, synthetic construct
  source 1..21: mol_type = other RNA
ctccggagaacatgtccactg

SEQ ID NO: 2868 - RNA, 21 nt, synthetic construct
  source 1..21: mol_type = other RNA
agtggacatgttctccggagc

SEQ ID NO: 2869 - RNA, 21 nt, synthetic construct
  source 1..21: mol_type = other RNA
gctccggagaacatgtccact

SEQ ID NO: 2870 - RNA, 21 nt, synthetic construct
  source 1..21: mol_type = other RNA
gtggacatgttctccggagct

SEQ ID NO: 2871 - RNA, 21 nt, synthetic construct
  source 1..21: mol_type = other RNA
agctccggagaacatgtccac

SEQ ID NO: 2872 - RNA, 21 nt, synthetic construct
  source 1..21: mol_type = other RNA
tggacatgttctccggagctg

SEQ ID NO: 2873 - RNA, 21 nt, synthetic construct
  source 1..21: mol_type = other RNA
cagctccggagaacatgtcca

SEQ ID NO: 2874 - RNA, 21 nt, synthetic construct
  source 1..21: mol_type = other RNA
ggacatgttctccggagctgt

SEQ ID NO: 2875 - RNA, 21 nt, synthetic construct
  source 1..21: mol_type = other RNA
acagctccggagaacatgtcc

SEQ ID NO: 2876 - RNA, 21 nt, synthetic construct
  source 1..21: mol_type = other RNA
gacatgttctccggagctgta

SEQ ID NO: 2877 - RNA, 21 nt, synthetic construct
  source 1..21: mol_type = other RNA
tacagctccggagaacatgtc

SEQ ID NO: 2878 - RNA, 21 nt, synthetic construct
  source 1..21: mol_type = other RNA
acatgttctccggagctgtat

SEQ ID NO: 2879 - RNA, 21 nt, synthetic construct
  source 1..21: mol_type = other RNA
atacagctccggagaacatgt

SEQ ID NO: 2880 - RNA, 21 nt, synthetic construct
  source 1..21: mol_type = other RNA
catgttctccggagctgtatt

SEQ ID NO: 2881 - RNA, 21 nt, synthetic construct
  source 1..21: mol_type = other RNA
aatacagctccggagaacatg

SEQ ID NO: 2882 - RNA, 21 nt, synthetic construct
  source 1..21: mol_type = other RNA
atgttctccggagctgtattc

SEQ ID NO: 2883 - RNA, 21 nt, synthetic construct
  source 1..21: mol_type = other RNA
gaatacagctccggagaacat

SEQ ID NO: 2884 - RNA, 21 nt, synthetic construct
  source 1..21: mol_type = other RNA
tgttctccggagctgtattca

SEQ ID NO: 2885 - RNA, 21 nt, synthetic construct
  source 1..21: mol_type = other RNA
tgaatacagctccggagaaca

SEQ ID NO: 2886 - RNA, 21 nt, synthetic construct
  source 1..21: mol_type = other RNA
gttctccggagctgtattcat

SEQ ID NO: 2887 - RNA, 21 nt, synthetic construct
  source 1..21: mol_type = other RNA
atgaatacagctccggagaac

SEQ ID NO: 2888 - RNA, 21 nt, synthetic construct
  source 1..21: mol_type = other RNA
ttctccggagctgtattcatc

SEQ ID NO: 2889 - RNA, 21 nt, synthetic construct
  source 1..21: mol_type = other RNA
gatgaatacagctccggagaa

SEQ ID NO: 2890 - RNA, 21 nt, synthetic construct
  source 1..21: mol_type = other RNA
tctccggagctgtattcatcc

SEQ ID NO: 2891 - RNA, 21 nt, synthetic construct
  source 1..21: mol_type = other RNA
ggatgaatacagctccggaga

SEQ ID NO: 2892 - RNA, 21 nt, synthetic construct
  source 1..21: mol_type = other RNA
ctccggagctgtattcatcca

SEQ ID NO: 2893 - RNA, 21 nt, synthetic construct
  source 1..21: mol_type = other RNA
tggatgaatacagctccggag

SEQ ID NO: 2894 - RNA, 21 nt, synthetic construct
  source 1..21: mol_type = other RNA
tccggagctgtattcatccag

SEQ ID NO: 2895 - RNA, 21 nt, synthetic construct
  source 1..21: mol_type = other RNA
ctggatgaatacagctccgga

SEQ ID NO: 2896 - RNA, 21 nt, synthetic construct
  source 1..21: mol_type = other RNA
ctgtattcatccagcaggctc

SEQ ID NO: 2897 - RNA, 21 nt, synthetic construct
  source 1..21: mol_type = other RNA
gagcctgctggatgaatacag

SEQ ID NO: 2898 - RNA, 21 nt, synthetic construct
  source 1..21: mol_type = other RNA
tgtattcatccagcaggctct

SEQ ID NO: 2899 - RNA, 21 nt, synthetic construct
  source 1..21: mol_type = other RNA
agagcctgctggatgaataca

SEQ ID NO: 2900 - RNA, 21 nt, synthetic construct
  source 1..21: mol_type = other RNA
gtattcatccagcaggctctg

SEQ ID NO: 2901 - RNA, 21 nt, synthetic construct
  source 1..21: mol_type = other RNA
cagagcctgctggatgaatac

SEQ ID NO: 2902 - RNA, 21 nt, synthetic construct
  source 1..21: mol_type = other RNA
acatctatgcctccgtcatcg

SEQ ID NO: 2903 - RNA, 21 nt, synthetic construct
  source 1..21: mol_type = other RNA
cgatgacggaggcatagatgt

SEQ ID NO: 2904 - RNA, 21 nt, synthetic construct
  source 1..21: mol_type = other RNA
catctatgcctccgtcatcgc

SEQ ID NO: 2905 - RNA, 21 nt, synthetic construct
  source 1..21: mol_type = other RNA
gcgatgacggaggcatagatg

SEQ ID NO: 2906 - RNA, 21 nt, synthetic construct
  source 1..21: mol_type = other RNA
atctatgcctccgtcatcgcg

SEQ ID NO: 2907 - RNA, 21 nt, synthetic construct
  source 1..21: mol_type = other RNA
cgcgatgacggaggcatagat

SEQ ID NO: 2908 - RNA, 21 nt, synthetic construct
  source 1..21: mol_type = other RNA
tctatgcctccgtcatcgcgc

SEQ ID NO: 2909 - RNA, 21 nt, synthetic construct
  source 1..21: mol_type = other RNA
gcgcgatgacggaggcataga

SEQ ID NO: 2910 - RNA, 21 nt, synthetic construct
  source 1..21: mol_type = other RNA
ctatgcctccgtcatcgcgct

SEQ ID NO: 2911 - RNA, 21 nt, synthetic construct
  source 1..21: mol_type = other RNA
agcgcgatgacggaggcatag

SEQ ID NO: 2912 - RNA, 21 nt, synthetic construct
  source 1..21: mol_type = other RNA
tatgcctccgtcatcgcgctt

SEQ ID NO: 2913 - RNA, 21 nt, synthetic construct
  source 1..21: mol_type = other RNA
aagcgcgatgacggaggcata

SEQ ID NO: 2914 - RNA, 21 nt, synthetic construct
  source 1..21: mol_type = other RNA
atgcctccgtcatcgcgcttc

SEQ ID NO: 2915 - RNA, 21 nt, synthetic construct
  source 1..21: mol_type = other RNA
gaagcgcgatgacggaggcat

SEQ ID NO: 2916 - RNA, 21 nt, synthetic construct
  source 1..21: mol_type = other RNA
tgcctccgtcatcgcgcttct

SEQ ID NO: 2917 - RNA, 21 nt, synthetic construct
  source 1..21: mol_type = other RNA
agaagcgcgatgacggaggca

SEQ ID NO: 2918 - RNA, 21 nt, synthetic construct
  source 1..21: mol_type = other RNA
cgtcatcgcgcttctgggcat

SEQ ID NO: 2919 - RNA, 21 nt, synthetic construct
  source 1..21: mol_type = other RNA
atgcccagaagcgcgatgacg

SEQ ID NO: 2920 - RNA, 21 nt, synthetic construct
  source 1..21: mol_type = other RNA
gtcatcgcgcttctgggcatc

SEQ ID NO: 2921 - RNA, 21 nt, synthetic construct
  source 1..21: mol_type = other RNA
gatgcccagaagcgcgatgac

SEQ ID NO: 2922 - RNA, 21 nt, synthetic construct
  source 1..21: mol_type = other RNA
tcatcgcgcttctgggcatca

SEQ ID NO: 2923 - RNA, 21 nt, synthetic construct
  source 1..21: mol_type = other RNA
tgatgcccagaagcgcgatga

SEQ ID NO: 2924 - RNA, 21 nt, synthetic construct
  source 1..21: mol_type = other RNA
catcgcgcttctgggcatcac

SEQ ID NO: 2925 - RNA, 21 nt, synthetic construct
  source 1..21: mol_type = other RNA
gtgatgcccagaagcgcgatg

SEQ ID NO: 2926 - RNA, 21 nt, synthetic construct
  source 1..21: mol_type = other RNA
atcgcgcttctgggcatcacc

SEQ ID NO: 2927 - RNA, 21 nt, synthetic construct
  source 1..21: mol_type = other RNA
ggtgatgcccagaagcgcgat

SEQ ID NO: 2928 - RNA, 21 nt, synthetic construct
  source 1..21: mol_type = other RNA
tcgcgcttctgggcatcacca

SEQ ID NO: 2929 - RNA, 21 nt, synthetic construct
  source 1..21: mol_type = other RNA
tggtgatgcccagaagcgcga

SEQ ID NO: 2930 - RNA, 21 nt, synthetic construct
  source 1..21: mol_type = other RNA
cgcgcttctgggcatcaccat

SEQ ID NO: 2931 - RNA, 21 nt, synthetic construct
  source 1..21: mol_type = other RNA
atggtgatgcccagaagcgcg

SEQ ID NO: 2932 - RNA, 21 nt, synthetic construct
  source 1..21: mol_type = other RNA
gcgcttctgggcatcaccatg

SEQ ID NO: 2933 - RNA, 21 nt, synthetic construct
  source 1..21: mol_type = other RNA
catggtgatgcccagaagcgc

SEQ ID NO: 2934 - RNA, 21 nt, synthetic construct
  source 1..21: mol_type = other RNA
cgcttctgggcatcaccatga

SEQ ID NO: 2935 - RNA, 21 nt, synthetic construct
  source 1..21: mol_type = other RNA
tcatggtgatgcccagaagcg

SEQ ID NO: 2936 - RNA, 21 nt, synthetic construct
  source 1..21: mol_type = other RNA
accatgatttacacggtgaca

SEQ ID NO: 2937 - RNA, 21 nt, synthetic construct
  source 1..21: mol_type = other RNA
tgtcaccgtgtaaatcatggt

SEQ ID NO: 2938 - RNA, 21 nt, synthetic construct
  source 1..21: mol_type = other RNA
ccatgatttacacggtgacag

SEQ ID NO: 2939 - RNA, 21 nt, synthetic construct
  source 1..21: mol_type = other RNA
ctgtcaccgtgtaaatcatgg

SEQ ID NO: 2940 - RNA, 21 nt, synthetic construct
  source 1..21: mol_type = other RNA
catgatttacacggtgacagg

SEQ ID NO: 2941 - RNA, 21 nt, synthetic construct
  source 1..21: mol_type = other RNA
cctgtcaccgtgtaaatcatg

SEQ ID NO: 2942 - RNA, 21 nt, synthetic construct
  source 1..21: mol_type = other RNA
atgatttacacggtgacagga

SEQ ID NO: 2943 - RNA, 21 nt, synthetic construct
  source 1..21: mol_type = other RNA
tcctgtcaccgtgtaaatcat

SEQ ID NO: 2944 - RNA, 21 nt, synthetic construct
  source 1..21: mol_type = other RNA
tgatttacacggtgacaggag

SEQ ID NO: 2945 - RNA, 21 nt, synthetic construct
  source 1..21: mol_type = other RNA
ctcctgtcaccgtgtaaatca

SEQ ID NO: 2946 - RNA, 21 nt, synthetic construct
  source 1..21: mol_type = other RNA
gatttacacggtgacaggagg

SEQ ID NO: 2947 - RNA, 21 nt, synthetic construct
  source 1..21: mol_type = other RNA
cctcctgtcaccgtgtaaatc

SEQ ID NO: 2948 - RNA, 21 nt, synthetic construct
  source 1..21: mol_type = other RNA
atttacacggtgacaggaggg

SEQ ID NO: 2949 - RNA, 21 nt, synthetic construct
  source 1..21: mol_type = other RNA
ccctcctgtcaccgtgtaaat

SEQ ID NO: 2950 - RNA, 21 nt, synthetic construct
  source 1..21: mol_type = other RNA
tttacacggtgacaggagggc

SEQ ID NO: 2951 - RNA, 21 nt, synthetic construct
  source 1..21: mol_type = other RNA
gccctcctgtcaccgtgtaaa

SEQ ID NO: 2952 - RNA, 21 nt, synthetic construct
  source 1..21: mol_type = other RNA
ttacacggtgacaggagggct

SEQ ID NO: 2953 - RNA, 21 nt, synthetic construct
  source 1..21: mol_type = other RNA
agccctcctgtcaccgtgtaa

SEQ ID NO: 2954 - RNA, 21 nt, synthetic construct
  source 1..21: mol_type = other RNA
tacacggtgacaggagggctg

SEQ ID NO: 2955 - RNA, 21 nt, synthetic construct
  source 1..21: mol_type = other RNA
cagccctcctgtcaccgtgta

SEQ ID NO: 2956 - RNA, 21 nt, synthetic construct
  source 1..21: mol_type = other RNA
cgcgctgatgtacacggacac

SEQ ID NO: 2957 - RNA, 21 nt, synthetic construct
  source 1..21: mol_type = other RNA
gtgtccgtgtacatcagcgcg

SEQ ID NO: 2958 - RNA, 21 nt, synthetic construct
  source 1..21: mol_type = other RNA
gcgctgatgtacacggacacg

SEQ ID NO: 2959 - RNA, 21 nt, synthetic construct
  source 1..21: mol_type = other RNA
cgtgtccgtgtacatcagcgc

SEQ ID NO: 2960 - RNA, 21 nt, synthetic construct
  source 1..21: mol_type = other RNA
cgctgatgtacacggacacgg

SEQ ID NO: 2961 - RNA, 21 nt, synthetic construct
  source 1..21: mol_type = other RNA
ccgtgtccgtgtacatcagcg

SEQ ID NO: 2962 - RNA, 21 nt, synthetic construct
  source 1..21: mol_type = other RNA
gctgatgtacacggacacggt

SEQ ID NO: 2963 - RNA, 21 nt, synthetic construct
  source 1..21: mol_type = other RNA
accgtgtccgtgtacatcagc

SEQ ID NO: 2964 - RNA, 21 nt, synthetic construct
  source 1..21: mol_type = other RNA
ctgatgtacacggacacggta

SEQ ID NO: 2965 - RNA, 21 nt, synthetic construct
  source 1..21: mol_type = other RNA
taccgtgtccgtgtacatcag

SEQ ID NO: 2966 - RNA, 21 nt, synthetic construct
  source 1..21: mol_type = other RNA
tacacggacacggtacagacc

SEQ ID NO: 2967 - RNA, 21 nt, synthetic construct
  source 1..21: mol_type = other RNA
ggtctgtaccgtgtccgtgta

SEQ ID NO: 2968 - RNA, 21 nt, synthetic construct
  source 1..21: mol_type = other RNA
acacggacacggtacagacct

SEQ ID NO: 2969 - RNA, 21 nt, synthetic construct
  source 1..21: mol_type = other RNA
aggtctgtaccgtgtccgtgt

SEQ ID NO: 2970 - RNA, 21 nt, synthetic construct
  source 1..21: mol_type = other RNA
cacggacacggtacagacctt

SEQ ID NO: 2971 - RNA, 21 nt, synthetic construct
  source 1..21: mol_type = other RNA
aaggtctgtaccgtgtccgtg

SEQ ID NO: 2972 - RNA, 21 nt, synthetic construct
  source 1..21: mol_type = other RNA
acggacacggtacagaccttc

SEQ ID NO: 2973 - RNA, 21 nt, synthetic construct
  source 1..21: mol_type = other RNA
gaaggtctgtaccgtgtccgt

SEQ ID NO: 2974 - RNA, 21 nt, synthetic construct
  source 1..21: mol_type = other RNA
cggacacggtacagaccttcg

SEQ ID NO: 2975 - RNA, 21 nt, synthetic construct
  source 1..21: mol_type = other RNA
cgaaggtctgtaccgtgtccg

SEQ ID NO: 2976 - RNA, 21 nt, synthetic construct
  source 1..21: mol_type = other RNA
ggacacggtacagaccttcgt

SEQ ID NO: 2977 - RNA, 21 nt, synthetic construct
  source 1..21: mol_type = other RNA
acgaaggtctgtaccgtgtcc

SEQ ID NO: 2978 - RNA, 21 nt, synthetic construct
  source 1..21: mol_type = other RNA
gacacggtacagaccttcgtc

SEQ ID NO: 2979 - RNA, 21 nt, synthetic construct
  source 1..21: mol_type = other RNA
gacgaaggtctgtaccgtgtc

SEQ ID NO: 2980 - RNA, 21 nt, synthetic construct
  source 1..21: mol_type = other RNA
acacggtacagaccttcgtca

SEQ ID NO: 2981 - RNA, 21 nt, synthetic construct
  source 1..21: mol_type = other RNA
tgacgaaggtctgtaccgtgt

SEQ ID NO: 2982 - RNA, 21 nt, synthetic construct
  source 1..21: mol_type = other RNA
cacggtacagaccttcgtcat

SEQ ID NO: 2983 - RNA, 21 nt, synthetic construct
  source 1..21: mol_type = other RNA
atgacgaaggtctgtaccgtg

SEQ ID NO: 2984 - RNA, 21 nt, synthetic construct
  source 1..21: mol_type = other RNA
acggtacagaccttcgtcatt

SEQ ID NO: 2985 - RNA, 21 nt, synthetic construct
  source 1..21: mol_type = other RNA
aatgacgaaggtctgtaccgt

SEQ ID NO: 2986 - RNA, 21 nt, synthetic construct
  source 1..21: mol_type = other RNA
cggtacagaccttcgtcattc

SEQ ID NO: 2987 - RNA, 21 nt, synthetic construct
  source 1..21: mol_type = other RNA
gaatgacgaaggtctgtaccg

SEQ ID NO: 2988 - RNA, 21 nt, synthetic construct
  source 1..21: mol_type = other RNA
ggtacagaccttcgtcattct

SEQ ID NO: 2989 - RNA, 21 nt, synthetic construct
  source 1..21: mol_type = other RNA
agaatgacgaaggtctgtacc

SEQ ID NO: 2990 - RNA, 21 nt, synthetic construct
  source 1..21: mol_type = other RNA
gcgcctgcatcctcatgggtt

SEQ ID NO: 2991 - RNA, 21 nt, synthetic construct
  source 1..21: mol_type = other RNA
aacccatgaggatgcaggcgc

SEQ ID NO: 2992 - RNA, 21 nt, synthetic construct
  source 1..21: mol_type = other RNA
cgcctgcatcctcatgggtta

SEQ ID NO: 2993 - RNA, 21 nt, synthetic construct
  source 1..21: mol_type = other RNA
taacccatgaggatgcaggcg

SEQ ID NO: 2994 - RNA, 21 nt, synthetic construct
  source 1..21: mol_type = other RNA
gcctgcatcctcatgggttac

SEQ ID NO: 2995 - RNA, 21 nt, synthetic construct
  source 1..21: mol_type = other RNA
gtaacccatgaggatgcaggc

SEQ ID NO: 2996 - RNA, 21 nt, synthetic construct
  source 1..21: mol_type = other RNA
cctgcatcctcatgggttacg

SEQ ID NO: 2997 - RNA, 21 nt, synthetic construct
  source 1..21: mol_type = other RNA
cgtaacccatgaggatgcagg

SEQ ID NO: 2998 - RNA, 21 nt, synthetic construct
  source 1..21: mol_type = other RNA
ctgcatcctcatgggttacgc

SEQ ID NO: 2999 - RNA, 21 nt, synthetic construct
  source 1..21: mol_type = other RNA
gcgtaacccatgaggatgcag

SEQ ID NO: 3000 - RNA, 21 nt, synthetic construct
  source 1..21: mol_type = other RNA
tgcatcctcatgggttacgcc

SEQ ID NO: 3001 - RNA, 21 nt, synthetic construct
  source 1..21: mol_type = other RNA
ggcgtaacccatgaggatgca

SEQ ID NO: 3002 - RNA, 21 nt, synthetic construct
  source 1..21: mol_type = other RNA
gcatcctcatgggttacgcct

SEQ ID NO: 3003 - RNA, 21 nt, synthetic construct
  source 1..21: mol_type = other RNA
aggcgtaacccatgaggatgc

SEQ ID NO: 3004 - RNA, 21 nt, synthetic construct
  source 1..21: mol_type = other RNA
catcctcatgggttacgcctt

SEQ ID NO: 3005 - RNA, 21 nt, synthetic construct
  source 1..21: mol_type = other RNA
aaggcgtaacccatgaggatg

SEQ ID NO: 3006 - RNA, 21 nt, synthetic construct
  source 1..21: mol_type = other RNA
atcctcatgggttacgccttc

SEQ ID NO: 3007 - RNA, 21 nt, synthetic construct
  source 1..21: mol_type = other RNA
gaaggcgtaacccatgaggat

SEQ ID NO: 3008 - RNA, 21 nt, synthetic construct
  source 1..21: mol_type = other RNA
tcctcatgggttacgccttcc

SEQ ID NO: 3009 - RNA, 21 nt, synthetic construct
  source 1..21: mol_type = other RNA
ggaaggcgtaacccatgagga

SEQ ID NO: 3010 - RNA, 21 nt, synthetic construct
  source 1..21: mol_type = other RNA
cctcatgggttacgccttcca

SEQ ID NO: 3011 - RNA, 21 nt, synthetic construct
  source 1..21: mol_type = other RNA
tggaaggcgtaacccatgagg

SEQ ID NO: 3012 - RNA, 21 nt, synthetic construct
  source 1..21: mol_type = other RNA
ctcatgggttacgccttccac

SEQ ID NO: 3013 - RNA, 21 nt, synthetic construct
  source 1..21: mol_type = other RNA
gtggaaggcgtaacccatgag

SEQ ID NO: 3014 - RNA, 21 nt, synthetic construct
  source 1..21: mol_type = other RNA
tcatgggttacgccttccacg

SEQ ID NO: 3015 - RNA, 21 nt, synthetic construct
  source 1..21: mol_type = other RNA
cgtggaaggcgtaacccatga

SEQ ID NO: 3016 - RNA, 21 nt, synthetic construct
  source 1..21: mol_type = other RNA
catgggttacgccttccacga

SEQ ID NO: 3017 - RNA, 21 nt, synthetic construct
  source 1..21: mol_type = other RNA
tcgtggaaggcgtaacccatg

SEQ ID NO: 3018 - RNA, 21 nt, synthetic construct
  source 1..21: mol_type = other RNA
atgggttacgccttccacgag

SEQ ID NO: 3019 - RNA, 21 nt, synthetic construct
  source 1..21: mol_type = other RNA
ctcgtggaaggcgtaacccat

SEQ ID NO: 3020 - RNA, 21 nt, synthetic construct
  source 1..21: mol_type = other RNA
tgggttacgccttccacgagg

SEQ ID NO: 3021 - RNA, 21 nt, synthetic construct
  source 1..21: mol_type = other RNA
cctcgtggaaggcgtaaccca

SEQ ID NO: 3022 - RNA, 21 nt, synthetic construct
  source 1..21: mol_type = other RNA
gggttacgccttccacgaggt

SEQ ID NO: 3023 - RNA, 21 nt, synthetic construct
  source 1..21: mol_type = other RNA
acctcgtggaaggcgtaaccc

SEQ ID NO: 3024 - RNA, 21 nt, synthetic construct
  source 1..21: mol_type = other RNA
ggttacgccttccacgaggtg

SEQ ID NO: 3025 - RNA, 21 nt, synthetic construct
  source 1..21: mol_type = other RNA
cacctcgtggaaggcgtaacc

SEQ ID NO: 3026 - RNA, 21 nt, synthetic construct
  source 1..21: mol_type = other RNA
gcgggtattcgggtctcttcg

SEQ ID NO: 3027 - RNA, 21 nt, synthetic construct
  source 1..21: mol_type = other RNA
cgaagagacccgaatacccgc

SEQ ID NO: 3028 - RNA, 21 nt, synthetic construct
  source 1..21: mol_type = other RNA
cgggtattcgggtctcttcga

SEQ ID NO: 3029 - RNA, 21 nt, synthetic construct
  source 1..21: mol_type = other RNA
tcgaagagacccgaatacccg

SEQ ID NO: 3030 - RNA, 21 nt, synthetic construct
  source 1..21: mol_type = other RNA
gggtattcgggtctcttcgac

SEQ ID NO: 3031 - RNA, 21 nt, synthetic construct
  source 1..21: mol_type = other RNA
gtcgaagagacccgaataccc

SEQ ID NO: 3032 - RNA, 21 nt, synthetic construct
  source 1..21: mol_type = other RNA
ggtattcgggtctcttcgaca

SEQ ID NO: 3033 - RNA, 21 nt, synthetic construct
  source 1..21: mol_type = other RNA
tgtcgaagagacccgaatacc

SEQ ID NO: 3034 - RNA, 21 nt, synthetic construct
  source 1..21: mol_type = other RNA
caaatacctgggagcagcgac

SEQ ID NO: 3035 - RNA, 21 nt, synthetic construct
  source 1..21: mol_type = other RNA
gtcgctgctcccaggtatttg

SEQ ID NO: 3036 - RNA, 21 nt, synthetic construct
  source 1..21: mol_type = other RNA
aaatacctgggagcagcgact

SEQ ID NO: 3037 - RNA, 21 nt, synthetic construct
  source 1..21: mol_type = other RNA
agtcgctgctcccaggtattt

SEQ ID NO: 3038 - RNA, 21 nt, synthetic construct
  source 1..21: mol_type = other RNA
aatacctgggagcagcgactt

SEQ ID NO: 3039 - RNA, 21 nt, synthetic construct
  source 1..21: mol_type = other RNA
aagtcgctgctcccaggtatt

SEQ ID NO: 3040 - RNA, 21 nt, synthetic construct
  source 1..21: mol_type = other RNA
atacctgggagcagcgacttc

SEQ ID NO: 3041 - RNA, 21 nt, synthetic construct
  source 1..21: mol_type = other RNA
gaagtcgctgctcccaggtat

SEQ ID NO: 3042 - RNA, 21 nt, synthetic construct
  source 1..21: mol_type = other RNA
tacctgggagcagcgacttcg

SEQ ID NO: 3043 - RNA, 21 nt, synthetic construct
  source 1..21: mol_type = other RNA
cgaagtcgctgctcccaggta

SEQ ID NO: 3044 - RNA, 21 nt, synthetic construct
  source 1..21: mol_type = other RNA
gacttcgctgacggtgtccga

SEQ ID NO: 3045 - RNA, 21 nt, synthetic construct
  source 1..21: mol_type = other RNA
tcggacaccgtcagcgaagtc

SEQ ID NO: 3046 - RNA, 21 nt, synthetic construct
  source 1..21: mol_type = other RNA
acttcgctgacggtgtccgag

SEQ ID NO: 3047 - RNA, 21 nt, synthetic construct
  source 1..21: mol_type = other RNA
ctcggacaccgtcagcgaagt

SEQ ID NO: 3048 - RNA, 21 nt, synthetic construct
  source 1..21: mol_type = other RNA
ttcgctgacggtgtccgagga

SEQ ID NO: 3049 - RNA, 21 nt, synthetic construct
  source 1..21: mol_type = other RNA
tcctcggacaccgtcagcgaa

SEQ ID NO: 3050 - RNA, 21 nt, synthetic construct
  source 1..21: mol_type = other RNA
tcgctgacggtgtccgaggat

SEQ ID NO: 3051 - RNA, 21 nt, synthetic construct
  source 1..21: mol_type = other RNA
atcctcggacaccgtcagcga

SEQ ID NO: 3052 - RNA, 21 nt, synthetic construct
  source 1..21: mol_type = other RNA
ctgacggtgtccgaggatcca

SEQ ID NO: 3053 - RNA, 21 nt, synthetic construct
  source 1..21: mol_type = other RNA
tggatcctcggacaccgtcag

SEQ ID NO: 3054 - RNA, 21 nt, synthetic construct
  source 1..21: mol_type = other RNA
tgacggtgtccgaggatccag

SEQ ID NO: 3055 - RNA, 21 nt, synthetic construct
  source 1..21: mol_type = other RNA
ctggatcctcggacaccgtca

SEQ ID NO: 3056 - RNA, 21 nt, synthetic construct
  source 1..21: mol_type = other RNA
acatctccagcttctgctatc

SEQ ID NO: 3057 - RNA, 21 nt, synthetic construct
  source 1..21: mol_type = other RNA
gatagcagaagctggagatgt

SEQ ID NO: 3058 - RNA, 21 nt, synthetic construct
  source 1..21: mol_type = other RNA
catctccagcttctgctatcg

SEQ ID NO: 3059 - RNA, 21 nt, synthetic construct
  source 1..21: mol_type = other RNA
cgatagcagaagctggagatg

SEQ ID NO: 3060 - RNA, 21 nt, synthetic construct
  source 1..21: mol_type = other RNA
atctccagcttctgctatcga

SEQ ID NO: 3061 - RNA, 21 nt, synthetic construct
  source 1..21: mol_type = other RNA
tcgatagcagaagctggagat

SEQ ID NO: 3062 - RNA, 21 nt, synthetic construct
  source 1..21: mol_type = other RNA
tctccagcttctgctatcgac

SEQ ID NO: 3063 - RNA, 21 nt, synthetic construct
  source 1..21: mol_type = other RNA
gtcgatagcagaagctggaga

SEQ ID NO: 3064 - RNA, 21 nt, synthetic construct
  source 1..21: mol_type = other RNA
ctccagcttctgctatcgacc

SEQ ID NO: 3065 - RNA, 21 nt, synthetic construct
  source 1..21: mol_type = other RNA
ggtcgatagcagaagctggag

SEQ ID NO: 3066 - RNA, 21 nt, synthetic construct
  source 1..21: mol_type = other RNA
tccagcttctgctatcgaccc

SEQ ID NO: 3067 - RNA, 21 nt, synthetic construct
  source 1..21: mol_type = other RNA
gggtcgatagcagaagctgga

SEQ ID NO: 3068 - RNA, 21 nt, synthetic construct
  source 1..21: mol_type = other RNA
ccagcttctgctatcgacccc

SEQ ID NO: 3069 - RNA, 21 nt, synthetic construct
  source 1..21: mol_type = other RNA
ggggtcgatagcagaagctgg

SEQ ID NO: 3070 - RNA, 21 nt, synthetic construct
  source 1..21: mol_type = other RNA
cagcttctgctatcgaccccg

SEQ ID NO: 3071 - RNA, 21 nt, synthetic construct
  source 1..21: mol_type = other RNA
cggggtcgatagcagaagctg

SEQ ID NO: 3072 - RNA, 21 nt, synthetic construct
  source 1..21: mol_type = other RNA
caatcgtctcgggctggtact

SEQ ID NO: 3073 - RNA, 21 nt, synthetic construct
  source 1..21: mol_type = other RNA
agtaccagcccgagacgattg

SEQ ID NO: 3074 - RNA, 21 nt, synthetic construct
  source 1..21: mol_type = other RNA
aatcgtctcgggctggtactg

SEQ ID NO: 3075 - RNA, 21 nt, synthetic construct
  source 1..21: mol_type = other RNA
cagtaccagcccgagacgatt

SEQ ID NO: 3076 - RNA, 21 nt, synthetic construct
  source 1..21: mol_type = other RNA
atcgtctcgggctggtactgg

SEQ ID NO: 3077 - RNA, 21 nt, synthetic construct
  source 1..21: mol_type = other RNA
ccagtaccagcccgagacgat

SEQ ID NO: 3078 - RNA, 21 nt, synthetic construct
  source 1..21: mol_type = other RNA
tcgtctcgggctggtactggt

SEQ ID NO: 3079 - RNA, 21 nt, synthetic construct
  source 1..21: mol_type = other RNA
accagtaccagcccgagacga

SEQ ID NO: 3080 - RNA, 21 nt, synthetic construct
  source 1..21: mol_type = other RNA
tctcgggctggtactggtgca

SEQ ID NO: 3081 - RNA, 21 nt, synthetic construct
  source 1..21: mol_type = other RNA
tgcaccagtaccagcccgaga

SEQ ID NO: 3082 - RNA, 21 nt, synthetic construct
  source 1..21: mol_type = other RNA
gtgcagcgaccaggtcatcgt

SEQ ID NO: 3083 - RNA, 21 nt, synthetic construct
  source 1..21: mol_type = other RNA
acgatgacctggtcgctgcac

SEQ ID NO: 3084 - RNA, 21 nt, synthetic construct
  source 1..21: mol_type = other RNA
tgcagcgaccaggtcatcgtg

SEQ ID NO: 3085 - RNA, 21 nt, synthetic construct
  source 1..21: mol_type = other RNA
cacgatgacctggtcgctgca

SEQ ID NO: 3086 - RNA, 21 nt, synthetic construct
  source 1..21: mol_type = other RNA
cagcgaccaggtcatcgtgca

SEQ ID NO: 3087 - RNA, 21 nt, synthetic construct
  source 1..21: mol_type = other RNA
tgcacgatgacctggtcgctg

SEQ ID NO: 3088 - RNA, 21 nt, synthetic construct
  source 1..21: mol_type = other RNA
agcgaccaggtcatcgtgcag

SEQ ID NO: 3089 - RNA, 21 nt, synthetic construct
  source 1..21: mol_type = other RNA
ctgcacgatgacctggtcgct

SEQ ID NO: 3090 - RNA, 21 nt, synthetic construct
  source 1..21: mol_type = other RNA
accaggtcatcgtgcagcgct

SEQ ID NO: 3091 - RNA, 21 nt, synthetic construct
  source 1..21: mol_type = other RNA
agcgctgcacgatgacctggt

SEQ ID NO: 3092 - RNA, 21 nt, synthetic construct
  source 1..21: mol_type = other RNA
cgggaagagcctgacccacat

SEQ ID NO: 3093 - RNA, 21 nt, synthetic construct
  source 1..21: mol_type = other RNA
atgtgggtcaggctcttcccg

SEQ ID NO: 3094 - RNA, 21 nt, synthetic construct
  source 1..21: mol_type = other RNA
gggaagagcctgacccacatc

SEQ ID NO: 3095 - RNA, 21 nt, synthetic construct
  source 1..21: mol_type = other RNA
gatgtgggtcaggctcttccc

SEQ ID NO: 3096 - RNA, 21 nt, synthetic construct
  source 1..21: mol_type = other RNA
ggaagagcctgacccacatca

SEQ ID NO: 3097 - RNA, 21 nt, synthetic construct
  source 1..21: mol_type = other RNA
tgatgtgggtcaggctcttcc

SEQ ID NO: 3098 - RNA, 21 nt, synthetic construct
  source 1..21: mol_type = other RNA
gaagagcctgacccacatcaa

SEQ ID NO: 3099 - RNA, 21 nt, synthetic construct
  source 1..21: mol_type = other RNA
ttgatgtgggtcaggctcttc

SEQ ID NO: 3100 - RNA, 21 nt, synthetic construct
  source 1..21: mol_type = other RNA
aagagcctgacccacatcaag

SEQ ID NO: 3101 - RNA, 21 nt, synthetic construct
  source 1..21: mol_type = other RNA
cttgatgtgggtcaggctctt

SEQ ID NO: 3102 - RNA, 21 nt, synthetic construct
  source 1..21: mol_type = other RNA
agagcctgacccacatcaagg

SEQ ID NO: 3103 - RNA, 21 nt, synthetic construct
  source 1..21: mol_type = other RNA
ccttgatgtgggtcaggctct

SEQ ID NO: 3104 - RNA, 21 nt, synthetic construct
  source 1..21: mol_type = other RNA
gggctgcatcctgtgtgggta

SEQ ID NO: 3105 - RNA, 21 nt, synthetic construct
  source 1..21: mol_type = other RNA
tacccacacaggatgcagccc

SEQ ID NO: 3106 - RNA, 21 nt, synthetic construct
  source 1..21: mol_type = other RNA
gctgcatcctgtgtgggtacc

SEQ ID NO: 3107 - RNA, 21 nt, synthetic construct
  source 1..21: mol_type = other RNA
ggtacccacacaggatgcagc

SEQ ID NO: 3108 - RNA, 21 nt, synthetic construct
  source 1..21: mol_type = other RNA
ctgcatcctgtgtgggtacct

SEQ ID NO: 3109 - RNA, 21 nt, synthetic construct
  source 1..21: mol_type = other RNA
aggtacccacacaggatgcag

SEQ ID NO: 3110 - RNA, 21 nt, synthetic construct
  source 1..21: mol_type = other RNA
tgcatcctgtgtgggtacctg

SEQ ID NO: 3111 - RNA, 21 nt, synthetic construct
  source 1..21: mol_type = other RNA
caggtacccacacaggatgca

SEQ ID NO: 3112 - RNA, 21 nt, synthetic construct
  source 1..21: mol_type = other RNA
gcatcctgtgtgggtacctga

SEQ ID NO: 3113 - RNA, 21 nt, synthetic construct
  source 1..21: mol_type = other RNA
tcaggtacccacacaggatgc

SEQ ID NO: 3114 - RNA, 21 nt, synthetic construct
  source 1..21: mol_type = other RNA
catcctgtgtgggtacctgaa

SEQ ID NO: 3115 - RNA, 21 nt, synthetic construct
  source 1..21: mol_type = other RNA
ttcaggtacccacacaggatg

SEQ ID NO: 3116 - RNA, 21 nt, synthetic construct
  source 1..21: mol_type = other RNA
atcctgtgtgggtacctgaag

SEQ ID NO: 3117 - RNA, 21 nt, synthetic construct
  source 1..21: mol_type = other RNA
cttcaggtacccacacaggat

SEQ ID NO: 3118 - RNA, 21 nt, synthetic construct
  source 1..21: mol_type = other RNA
tcctgtgtgggtacctgaagc

SEQ ID NO: 3119 - RNA, 21 nt, synthetic construct
  source 1..21: mol_type = other RNA
gcttcaggtacccacacagga

SEQ ID NO: 3120 - RNA, 21 nt, synthetic construct
  source 1..21: mol_type = other RNA
cctgtgtgggtacctgaagct

SEQ ID NO: 3121 - RNA, 21 nt, synthetic construct
  source 1..21: mol_type = other RNA
agcttcaggtacccacacagg

SEQ ID NO: 3122 - RNA, 21 nt, synthetic construct
  source 1..21: mol_type = other RNA
ctgtgtgggtacctgaagctg

SEQ ID NO: 3123 - RNA, 21 nt, synthetic construct
  source 1..21: mol_type = other RNA
cagcttcaggtacccacacag

SEQ ID NO: 3124 - RNA, 21 nt, synthetic construct
  source 1..21: mol_type = other RNA
tgtgtgggtacctgaagctga

SEQ ID NO: 3125 - RNA, 21 nt, synthetic construct
  source 1..21: mol_type = other RNA
tcagcttcaggtacccacaca

SEQ ID NO: 3126 - RNA, 21 nt, synthetic construct
  source 1..21: mol_type = other RNA
gtgtgggtacctgaagctgac

SEQ ID NO: 3127 - RNA, 21 nt, synthetic construct
  source 1..21: mol_type = other RNA
gtcagcttcaggtacccacac

SEQ ID NO: 3128 - RNA, 21 nt, synthetic construct
  source 1..21: mol_type = other RNA
tgtgggtacctgaagctgacg

SEQ ID NO: 3129 - RNA, 21 nt, synthetic construct
  source 1..21: mol_type = other RNA
cgtcagcttcaggtacccaca

SEQ ID NO: 3130 - RNA, 21 nt, synthetic construct
  source 1..21: mol_type = other RNA
gtgggtacctgaagctgacgc

SEQ ID NO: 3131 - RNA, 21 nt, synthetic construct
  source 1..21: mol_type = other RNA
gcgtcagcttcaggtacccac

SEQ ID NO: 3132 - RNA, 21 nt, synthetic construct
  source 1..21: mol_type = other RNA
tgggtacctgaagctgacgcc

SEQ ID NO: 3133 - RNA, 21 nt, synthetic construct
  source 1..21: mol_type = other RNA
ggcgtcagcttcaggtaccca

SEQ ID NO: 3134 - RNA, 21 nt, synthetic construct
  source 1..21: mol_type = other RNA
ggtacctgaagctgacgccca

SEQ ID NO: 3135 - RNA, 21 nt, synthetic construct
  source 1..21: mol_type = other RNA
tgggcgtcagcttcaggtacc

SEQ ID NO: 3136 - RNA, 21 nt, synthetic construct
  source 1..21: mol_type = other RNA
gtacctgaagctgacgcccat

SEQ ID NO: 3137 - RNA, 21 nt, synthetic construct
  source 1..21: mol_type = other RNA
atgggcgtcagcttcaggtac

SEQ ID NO: 3138 - RNA, 21 nt, synthetic construct
  source 1..21: mol_type = other RNA
tacctgaagctgacgcccatg

SEQ ID NO: 3139 - RNA, 21 nt, synthetic construct
  source 1..21: mol_type = other RNA
catgggcgtcagcttcaggta

SEQ ID NO: 3140 - RNA, 21 nt, synthetic construct
  source 1..21: mol_type = other RNA
acctgaagctgacgcccatgt

SEQ ID NO: 3141 - RNA, 21 nt, synthetic construct
  source 1..21: mol_type = other RNA
acatgggcgtcagcttcaggt

SEQ ID NO: 3142 - RNA, 21 nt, synthetic construct
  source 1..21: mol_type = other RNA
cctgaagctgacgcccatgtt

SEQ ID NO: 3143 - RNA, 21 nt, synthetic construct
  source 1..21: mol_type = other RNA
aacatgggcgtcagcttcagg

SEQ ID NO: 3144 - RNA, 21 nt, synthetic construct
  source 1..21: mol_type = other RNA
ctgaagctgacgcccatgttt

SEQ ID NO: 3145 - RNA, 21 nt, synthetic construct
  source 1..21: mol_type = other RNA
aaacatgggcgtcagcttcag

SEQ ID NO: 3146 - RNA, 21 nt, synthetic construct
  source 1..21: mol_type = other RNA
tgaagctgacgcccatgtttc

SEQ ID NO: 3147 - RNA, 21 nt, synthetic construct
  source 1..21: mol_type = other RNA
gaaacatgggcgtcagcttca

SEQ ID NO: 3148 - RNA, 21 nt, synthetic construct
  source 1..21: mol_type = other RNA
gaagctgacgcccatgtttct

SEQ ID NO: 3149 - RNA, 21 nt, synthetic construct
  source 1..21: mol_type = other RNA
agaaacatgggcgtcagcttc

SEQ ID NO: 3150 - RNA, 21 nt, synthetic construct
  source 1..21: mol_type = other RNA
aagctgacgcccatgtttctc

SEQ ID NO: 3151 - RNA, 21 nt, synthetic construct
  source 1..21: mol_type = other RNA
gagaaacatgggcgtcagctt

SEQ ID NO: 3152 - RNA, 21 nt, synthetic construct
  source 1..21: mol_type = other RNA
agctgacgcccatgtttctca

SEQ ID NO: 3153 - RNA, 21 nt, synthetic construct
  source 1..21: mol_type = other RNA
tgagaaacatgggcgtcagct

SEQ ID NO: 3154 - RNA, 21 nt, synthetic construct
  source 1..21: mol_type = other RNA
gctgacgcccatgtttctcat

SEQ ID NO: 3155 - RNA, 21 nt, synthetic construct
  source 1..21: mol_type = other RNA
atgagaaacatgggcgtcagc

SEQ ID NO: 3156 - RNA, 21 nt, synthetic construct
  source 1..21: mol_type = other RNA
atgtttctcatggtcatgcca

SEQ ID NO: 3157 - RNA, 21 nt, synthetic construct
  source 1..21: mol_type = other RNA
tggcatgaccatgagaaacat

SEQ ID NO: 3158 - RNA, 21 nt, synthetic construct
  source 1..21: mol_type = other RNA
tgtttctcatggtcatgccag

SEQ ID NO: 3159 - RNA, 21 nt, synthetic construct
  source 1..21: mol_type = other RNA
ctggcatgaccatgagaaaca

SEQ ID NO: 3160 - RNA, 21 nt, synthetic construct
  source 1..21: mol_type = other RNA
gtttctcatggtcatgccagg

SEQ ID NO: 3161 - RNA, 21 nt, synthetic construct
  source 1..21: mol_type = other RNA
cctggcatgaccatgagaaac

SEQ ID NO: 3162 - RNA, 21 nt, synthetic construct
  source 1..21: mol_type = other RNA
tttctcatggtcatgccaggc

SEQ ID NO: 3163 - RNA, 21 nt, synthetic construct
  source 1..21: mol_type = other RNA
gcctggcatgaccatgagaaa

SEQ ID NO: 3164 - RNA, 21 nt, synthetic construct
  source 1..21: mol_type = other RNA
ttctcatggtcatgccaggca

SEQ ID NO: 3165 - RNA, 21 nt, synthetic construct
  source 1..21: mol_type = other RNA
tgcctggcatgaccatgagaa

SEQ ID NO: 3166 - RNA, 21 nt, synthetic construct
  source 1..21: mol_type = other RNA
tgccaggcatgatcagccgca

SEQ ID NO: 3167 - RNA, 21 nt, synthetic construct
  source 1..21: mol_type = other RNA
tgcggctgatcatgcctggca

SEQ ID NO: 3168 - RNA, 21 nt, synthetic construct
  source 1..21: mol_type = other RNA
gccaggcatgatcagccgcat

SEQ ID NO: 3169 - RNA, 21 nt, synthetic construct
  source 1..21: mol_type = other RNA
atgcggctgatcatgcctggc

SEQ ID NO: 3170 - RNA, 21 nt, synthetic construct
  source 1..21: mol_type = other RNA
ccaggcatgatcagccgcatt

SEQ ID NO: 3171 - RNA, 21 nt, synthetic construct
  source 1..21: mol_type = other RNA
aatgcggctgatcatgcctgg

SEQ ID NO: 3172 - RNA, 21 nt, synthetic construct
  source 1..21: mol_type = other RNA
caggcatgatcagccgcattc

SEQ ID NO: 3173 - RNA, 21 nt, synthetic construct
  source 1..21: mol_type = other RNA
gaatgcggctgatcatgcctg

SEQ ID NO: 3174 - RNA, 21 nt, synthetic construct
  source 1..21: mol_type = other RNA
aggcatgatcagccgcattct

SEQ ID NO: 3175 - RNA, 21 nt, synthetic construct
  source 1..21: mol_type = other RNA
agaatgcggctgatcatgcct

SEQ ID NO: 3176 - RNA, 21 nt, synthetic construct
  source 1..21: mol_type = other RNA
ggcatgatcagccgcattctg

SEQ ID NO: 3177 - RNA, 21 nt, synthetic construct
  source 1..21: mol_type = other RNA
cagaatgcggctgatcatgcc

SEQ ID NO: 3178 - RNA, 21 nt, synthetic construct
  source 1..21: mol_type = other RNA
gcatgatcagccgcattctgt

SEQ ID NO: 3179 - RNA, 21 nt, synthetic construct
  source 1..21: mol_type = other RNA
acagaatgcggctgatcatgc

SEQ ID NO: 3180 - RNA, 21 nt, synthetic construct
  source 1..21: mol_type = other RNA
catgatcagccgcattctgta

SEQ ID NO: 3181 - RNA, 21 nt, synthetic construct
  source 1..21: mol_type = other RNA
tacagaatgcggctgatcatg

SEQ ID NO: 3182 - RNA, 21 nt, synthetic construct
  source 1..21: mol_type = other RNA
tgtacccagacgaggtggcgt

SEQ ID NO: 3183 - RNA, 21 nt, synthetic construct
  source 1..21: mol_type = other RNA
acgccacctcgtctgggtaca

SEQ ID NO: 3184 - RNA, 21 nt, synthetic construct
  source 1..21: mol_type = other RNA
gcggctcgtcgtgaagctcat

SEQ ID NO: 3185 - RNA, 21 nt, synthetic construct
  source 1..21: mol_type = other RNA
atgagcttcacgacgagccgc

SEQ ID NO: 3186 - RNA, 21 nt, synthetic construct
  source 1..21: mol_type = other RNA
cggctcgtcgtgaagctcatg

SEQ ID NO: 3187 - RNA, 21 nt, synthetic construct
  source 1..21: mol_type = other RNA
catgagcttcacgacgagccg

SEQ ID NO: 3188 - RNA, 21 nt, synthetic construct
  source 1..21: mol_type = other RNA
ggctcgtcgtgaagctcatgc

SEQ ID NO: 3189 - RNA, 21 nt, synthetic construct
  source 1..21: mol_type = other RNA
gcatgagcttcacgacgagcc

SEQ ID NO: 3190 - RNA, 21 nt, synthetic construct
  source 1..21: mol_type = other RNA
gctcgtcgtgaagctcatgcc

SEQ ID NO: 3191 - RNA, 21 nt, synthetic construct
  source 1..21: mol_type = other RNA
ggcatgagcttcacgacgagc

SEQ ID NO: 3192 - RNA, 21 nt, synthetic construct
  source 1..21: mol_type = other RNA
ctcgtcgtgaagctcatgccc

SEQ ID NO: 3193 - RNA, 21 nt, synthetic construct
  source 1..21: mol_type = other RNA
gggcatgagcttcacgacgag

SEQ ID NO: 3194 - RNA, 21 nt, synthetic construct
  source 1..21: mol_type = other RNA
tcgtcgtgaagctcatgccca

SEQ ID NO: 3195 - RNA, 21 nt, synthetic construct
  source 1..21: mol_type = other RNA
tgggcatgagcttcacgacga

SEQ ID NO: 3196 - RNA, 21 nt, synthetic construct
  source 1..21: mol_type = other RNA
cgtcgtgaagctcatgcccaa

SEQ ID NO: 3197 - RNA, 21 nt, synthetic construct
  source 1..21: mol_type = other RNA
ttgggcatgagcttcacgacg

SEQ ID NO: 3198 - RNA, 21 nt, synthetic construct
  source 1..21: mol_type = other RNA
gtcgtgaagctcatgcccaac

SEQ ID NO: 3199 - RNA, 21 nt, synthetic construct
  source 1..21: mol_type = other RNA
gttgggcatgagcttcacgac

SEQ ID NO: 3200 - RNA, 21 nt, synthetic construct
  source 1..21: mol_type = other RNA
tcgtgaagctcatgcccaacg

SEQ ID NO: 3201 - RNA, 21 nt, synthetic construct
  source 1..21: mol_type = other RNA
cgttgggcatgagcttcacga

SEQ ID NO: 3202 - RNA, 21 nt, synthetic construct
  source 1..21: mol_type = other RNA
cgtgaagctcatgcccaacgg

SEQ ID NO: 3203 - RNA, 21 nt, synthetic construct
  source 1..21: mol_type = other RNA
ccgttgggcatgagcttcacg

SEQ ID NO: 3204 - RNA, 21 nt, synthetic construct
  source 1..21: mol_type = other RNA
gtgaagctcatgcccaacggt

SEQ ID NO: 3205 - RNA, 21 nt, synthetic construct
  source 1..21: mol_type = other RNA
accgttgggcatgagcttcac

SEQ ID NO: 3206 - RNA, 21 nt, synthetic construct
  source 1..21: mol_type = other RNA
tgaagctcatgcccaacggtc

SEQ ID NO: 3207 - RNA, 21 nt, synthetic construct
  source 1..21: mol_type = other RNA
gaccgttgggcatgagcttca

SEQ ID NO: 3208 - RNA, 21 nt, synthetic construct
  source 1..21: mol_type = other RNA
gaagctcatgcccaacggtct

SEQ ID NO: 3209 - RNA, 21 nt, synthetic construct
  source 1..21: mol_type = other RNA
agaccgttgggcatgagcttc

SEQ ID NO: 3210 - RNA, 21 nt, synthetic construct
  source 1..21: mol_type = other RNA
aagctcatgcccaacggtctg

SEQ ID NO: 3211 - RNA, 21 nt, synthetic construct
  source 1..21: mol_type = other RNA
cagaccgttgggcatgagctt

SEQ ID NO: 3212 - RNA, 21 nt, synthetic construct
  source 1..21: mol_type = other RNA
agctcatgcccaacggtctgc

SEQ ID NO: 3213 - RNA, 21 nt, synthetic construct
  source 1..21: mol_type = other RNA
gcagaccgttgggcatgagct

SEQ ID NO: 3214 - RNA, 21 nt, synthetic construct
  source 1..21: mol_type = other RNA
cggactcatgctggcggtcat

SEQ ID NO: 3215 - RNA, 21 nt, synthetic construct
  source 1..21: mol_type = other RNA
atgaccgccagcatgagtccg

SEQ ID NO: 3216 - RNA, 21 nt, synthetic construct
  source 1..21: mol_type = other RNA
tcatgtcctcgctggcctcca

SEQ ID NO: 3217 - RNA, 21 nt, synthetic construct
  source 1..21: mol_type = other RNA
tggaggccagcgaggacatga

SEQ ID NO: 3218 - RNA, 21 nt, synthetic construct
  source 1..21: mol_type = other RNA
catgtcctcgctggcctccat

SEQ ID NO: 3219 - RNA, 21 nt, synthetic construct
  source 1..21: mol_type = other RNA
atggaggccagcgaggacatg

SEQ ID NO: 3220 - RNA, 21 nt, synthetic construct
  source 1..21: mol_type = other RNA
atgtcctcgctggcctccatc

SEQ ID NO: 3221 - RNA, 21 nt, synthetic construct
  source 1..21: mol_type = other RNA
gatggaggccagcgaggacat

SEQ ID NO: 3222 - RNA, 21 nt, synthetic construct
  source 1..21: mol_type = other RNA
tgtcctcgctggcctccatct

SEQ ID NO: 3223 - RNA, 21 nt, synthetic construct
  source 1..21: mol_type = other RNA
agatggaggccagcgaggaca

SEQ ID NO: 3224 - RNA, 21 nt, synthetic construct
  source 1..21: mol_type = other RNA
gtcctcgctggcctccatctt

SEQ ID NO: 3225 - RNA, 21 nt, synthetic construct
  source 1..21: mol_type = other RNA
aagatggaggccagcgaggac

SEQ ID NO: 3226 - RNA, 21 nt, synthetic construct
  source 1..21: mol_type = other RNA
tcctcgctggcctccatcttc

SEQ ID NO: 3227 - RNA, 21 nt, synthetic construct
  source 1..21: mol_type = other RNA
gaagatggaggccagcgagga

SEQ ID NO: 3228 - RNA, 21 nt, synthetic construct
  source 1..21: mol_type = other RNA
cctcgctggcctccatcttca

SEQ ID NO: 3229 - RNA, 21 nt, synthetic construct
  source 1..21: mol_type = other RNA
tgaagatggaggccagcgagg

SEQ ID NO: 3230 - RNA, 21 nt, synthetic construct
  source 1..21: mol_type = other RNA
ctcgctggcctccatcttcaa

SEQ ID NO: 3231 - RNA, 21 nt, synthetic construct
  source 1..21: mol_type = other RNA
ttgaagatggaggccagcgag

SEQ ID NO: 3232 - RNA, 21 nt, synthetic construct
  source 1..21: mol_type = other RNA
tcgctggcctccatcttcaac

SEQ ID NO: 3233 - RNA, 21 nt, synthetic construct
  source 1..21: mol_type = other RNA
gttgaagatggaggccagcga

SEQ ID NO: 3234 - RNA, 21 nt, synthetic construct
  source 1..21: mol_type = other RNA
acagcagcagcacgctcttca

SEQ ID NO: 3235 - RNA, 21 nt, synthetic construct
  source 1..21: mol_type = other RNA
tgaagagcgtgctgctgctgt

SEQ ID NO: 3236 - RNA, 21 nt, synthetic construct
  source 1..21: mol_type = other RNA
cagcagcagcacgctcttcac

SEQ ID NO: 3237 - RNA, 21 nt, synthetic construct
  source 1..21: mol_type = other RNA
gtgaagagcgtgctgctgctg

SEQ ID NO: 3238 - RNA, 21 nt, synthetic construct
  source 1..21: mol_type = other RNA
agcagcagcacgctcttcacc

SEQ ID NO: 3239 - RNA, 21 nt, synthetic construct
  source 1..21: mol_type = other RNA
ggtgaagagcgtgctgctgct

SEQ ID NO: 3240 - RNA, 21 nt, synthetic construct
  source 1..21: mol_type = other RNA
gcagcagcacgctcttcacca

SEQ ID NO: 3241 - RNA, 21 nt, synthetic construct
  source 1..21: mol_type = other RNA
tggtgaagagcgtgctgctgc

SEQ ID NO: 3242 - RNA, 21 nt, synthetic construct
  source 1..21: mol_type = other RNA
cagcagcacgctcttcaccat

SEQ ID NO: 3243 - RNA, 21 nt, synthetic construct
  source 1..21: mol_type = other RNA
atggtgaagagcgtgctgctg

SEQ ID NO: 3244 - RNA, 21 nt, synthetic construct
  source 1..21: mol_type = other RNA
agcagcacgctcttcaccatg

SEQ ID NO: 3245 - RNA, 21 nt, synthetic construct
  source 1..21: mol_type = other RNA
catggtgaagagcgtgctgct

SEQ ID NO: 3246 - RNA, 21 nt, synthetic construct
  source 1..21: mol_type = other RNA
gcagcacgctcttcaccatgg

SEQ ID NO: 3247 - RNA, 21 nt, synthetic construct
  source 1..21: mol_type = other RNA
ccatggtgaagagcgtgctgc

SEQ ID NO: 3248 - RNA, 21 nt, synthetic construct
  source 1..21: mol_type = other RNA
cagcacgctcttcaccatgga

SEQ ID NO: 3249 - RNA, 21 nt, synthetic construct
  source 1..21: mol_type = other RNA
tccatggtgaagagcgtgctg

SEQ ID NO: 3250 - RNA, 21 nt, synthetic construct
  source 1..21: mol_type = other RNA
agcacgctcttcaccatggac

SEQ ID NO: 3251 - RNA, 21 nt, synthetic construct
  source 1..21: mol_type = other RNA
gtccatggtgaagagcgtgct

SEQ ID NO: 3252 - RNA, 21 nt, synthetic construct
  source 1..21: mol_type = other RNA
gcacgctcttcaccatggaca

SEQ ID NO: 3253 - RNA, 21 nt, synthetic construct
  source 1..21: mol_type = other RNA
tgtccatggtgaagagcgtgc

SEQ ID NO: 3254 - RNA, 21 nt, synthetic construct
  source 1..21: mol_type = other RNA
cacgctcttcaccatggacat

SEQ ID NO: 3255 - RNA, 21 nt, synthetic construct
  source 1..21: mol_type = other RNA
atgtccatggtgaagagcgtg

SEQ ID NO: 3256 - RNA, 21 nt, synthetic construct
  source 1..21: mol_type = other RNA
acgctcttcaccatggacatc

SEQ ID NO: 3257 - RNA, 21 nt, synthetic construct
  source 1..21: mol_type = other RNA
gatgtccatggtgaagagcgt

SEQ ID NO: 3258 - RNA, 21 nt, synthetic construct
  source 1..21: mol_type = other RNA
cgctcttcaccatggacatct

SEQ ID NO: 3259 - RNA, 21 nt, synthetic construct
  source 1..21: mol_type = other RNA
agatgtccatggtgaagagcg

SEQ ID NO: 3260 - RNA, 21 nt, synthetic construct
  source 1..21: mol_type = other RNA
gctcttcaccatggacatcta

SEQ ID NO: 3261 - RNA, 21 nt, synthetic construct
  source 1..21: mol_type = other RNA
tagatgtccatggtgaagagc

SEQ ID NO: 3262 - RNA, 21 nt, synthetic construct
  source 1..21: mol_type = other RNA
ttcaccatggacatctacacg

SEQ ID NO: 3263 - RNA, 21 nt, synthetic construct
  source 1..21: mol_type = other RNA
cgtgtagatgtccatggtgaa

SEQ ID NO: 3264 - RNA, 21 nt, synthetic construct
  source 1..21: mol_type = other RNA
tcaccatggacatctacacgc

SEQ ID NO: 3265 - RNA, 21 nt, synthetic construct
  source 1..21: mol_type = other RNA
gcgtgtagatgtccatggtga

SEQ ID NO: 3266 - RNA, 21 nt, synthetic construct
  source 1..21: mol_type = other RNA
caccatggacatctacacgcg

SEQ ID NO: 3267 - RNA, 21 nt, synthetic construct
  source 1..21: mol_type = other RNA
cgcgtgtagatgtccatggtg

SEQ ID NO: 3268 - RNA, 21 nt, synthetic construct
  source 1..21: mol_type = other RNA
accatggacatctacacgcgc

SEQ ID NO: 3269 - RNA, 21 nt, synthetic construct
  source 1..21: mol_type = other RNA
gcgcgtgtagatgtccatggt

SEQ ID NO: 3270 - RNA, 21 nt, synthetic construct
  source 1..21: mol_type = other RNA
tcgtggtagtgtcggtggcct

SEQ ID NO: 3271 - RNA, 21 nt, synthetic construct
  source 1..21: mol_type = other RNA
aggccaccgacactaccacga

SEQ ID NO: 3272 - RNA, 21 nt, synthetic construct
  source 1..21: mol_type = other RNA
gtagtgtcggtggcctggctt

SEQ ID NO: 3273 - RNA, 21 nt, synthetic construct
  source 1..21: mol_type = other RNA
aagccaggccaccgacactac

SEQ ID NO: 3274 - RNA, 21 nt, synthetic construct
  source 1..21: mol_type = other RNA
tagtgtcggtggcctggcttc

SEQ ID NO: 3275 - RNA, 21 nt, synthetic construct
  source 1..21: mol_type = other RNA
gaagccaggccaccgacacta

SEQ ID NO: 3276 - RNA, 21 nt, synthetic construct
  source 1..21: mol_type = other RNA
cgggcagctcttcgattacat

SEQ ID NO: 3277 - RNA, 21 nt, synthetic construct
  source 1..21: mol_type = other RNA
atgtaatcgaagagctgcccg

SEQ ID NO: 3278 - RNA, 21 nt, synthetic construct
  source 1..21: mol_type = other RNA
gggcagctcttcgattacatc

SEQ ID NO: 3279 - RNA, 21 nt, synthetic construct
  source 1..21: mol_type = other RNA
gatgtaatcgaagagctgccc

SEQ ID NO: 3280 - RNA, 21 nt, synthetic construct
  source 1..21: mol_type = other RNA
ggcagctcttcgattacatcc

SEQ ID NO: 3281 - RNA, 21 nt, synthetic construct
  source 1..21: mol_type = other RNA
ggatgtaatcgaagagctgcc

SEQ ID NO: 3282 - RNA, 21 nt, synthetic construct
  source 1..21: mol_type = other RNA
gcagctcttcgattacatcca

SEQ ID NO: 3283 - RNA, 21 nt, synthetic construct
  source 1..21: mol_type = other RNA
tggatgtaatcgaagagctgc

SEQ ID NO: 3284 - RNA, 21 nt, synthetic construct
  source 1..21: mol_type = other RNA
cagctcttcgattacatccag

SEQ ID NO: 3285 - RNA, 21 nt, synthetic construct
  source 1..21: mol_type = other RNA
ctggatgtaatcgaagagctg

SEQ ID NO: 3286 - RNA, 21 nt, synthetic construct
  source 1..21: mol_type = other RNA
agctcttcgattacatccagg

SEQ ID NO: 3287 - RNA, 21 nt, synthetic construct
  source 1..21: mol_type = other RNA
cctggatgtaatcgaagagct

SEQ ID NO: 3288 - RNA, 21 nt, synthetic construct
  source 1..21: mol_type = other RNA
gctcttcgattacatccaggc

SEQ ID NO: 3289 - RNA, 21 nt, synthetic construct
  source 1..21: mol_type = other RNA
gcctggatgtaatcgaagagc

SEQ ID NO: 3290 - RNA, 21 nt, synthetic construct
  source 1..21: mol_type = other RNA
ctcttcgattacatccaggca

SEQ ID NO: 3291 - RNA, 21 nt, synthetic construct
  source 1..21: mol_type = other RNA
tgcctggatgtaatcgaagag

SEQ ID NO: 3292 - RNA, 21 nt, synthetic construct
  source 1..21: mol_type = other RNA
tcttcgattacatccaggcag

SEQ ID NO: 3293 - RNA, 21 nt, synthetic construct
  source 1..21: mol_type = other RNA
ctgcctggatgtaatcgaaga

SEQ ID NO: 3294 - RNA, 21 nt, synthetic construct
  source 1..21: mol_type = other RNA
cttcgattacatccaggcagt

SEQ ID NO: 3295 - RNA, 21 nt, synthetic construct
  source 1..21: mol_type = other RNA
actgcctggatgtaatcgaag

SEQ ID NO: 3296 - RNA, 21 nt, synthetic construct
  source 1..21: mol_type = other RNA
ttcgattacatccaggcagtc

SEQ ID NO: 3297 - RNA, 21 nt, synthetic construct
  source 1..21: mol_type = other RNA
gactgcctggatgtaatcgaa

SEQ ID NO: 3298 - RNA, 21 nt, synthetic construct
  source 1..21: mol_type = other RNA
tcgattacatccaggcagtct

SEQ ID NO: 3299 - RNA, 21 nt, synthetic construct
  source 1..21: mol_type = other RNA
agactgcctggatgtaatcga

SEQ ID NO: 3300 - RNA, 21 nt, synthetic construct
  source 1..21: mol_type = other RNA
cgattacatccaggcagtctc

SEQ ID NO: 3301 - RNA, 21 nt, synthetic construct
  source 1..21: mol_type = other RNA
gagactgcctggatgtaatcg

SEQ ID NO: 3302 - RNA, 21 nt, synthetic construct
  source 1..21: mol_type = other RNA
gattacatccaggcagtctct

SEQ ID NO: 3303 - RNA, 21 nt, synthetic construct
  source 1..21: mol_type = other RNA
agagactgcctggatgtaatc

SEQ ID NO: 3304 - RNA, 21 nt, synthetic construct
  source 1..21: mol_type = other RNA
attacatccaggcagtctcta

SEQ ID NO: 3305 - RNA, 21 nt, synthetic construct
  source 1..21: mol_type = other RNA
tagagactgcctggatgtaat

SEQ ID NO: 3306 - RNA, 21 nt, synthetic construct
  source 1..21: mol_type = other RNA
ttacatccaggcagtctctag

SEQ ID NO: 3307 - RNA, 21 nt, synthetic construct
  source 1..21: mol_type = other RNA
ctagagactgcctggatgtaa

SEQ ID NO: 3308 - RNA, 21 nt, synthetic construct
  source 1..21: mol_type = other RNA
tacatccaggcagtctctagc

SEQ ID NO: 3309 - RNA, 21 nt, synthetic construct
  source 1..21: mol_type = other RNA
gctagagactgcctggatgta

SEQ ID NO: 3310 - RNA, 21 nt, synthetic construct
  source 1..21: mol_type = other RNA
acatccaggcagtctctagct

SEQ ID NO: 3311 - RNA, 21 nt, synthetic construct
  source 1..21: mol_type = other RNA
agctagagactgcctggatgt

SEQ ID NO: 3312 - RNA, 21 nt, synthetic construct
  source 1..21: mol_type = other RNA
catccaggcagtctctagcta

SEQ ID NO: 3313 - RNA, 21 nt, synthetic construct
  source 1..21: mol_type = other RNA
tagctagagactgcctggatg

SEQ ID NO: 3314 - RNA, 21 nt, synthetic construct
  source 1..21: mol_type = other RNA
atccaggcagtctctagctac

SEQ ID NO: 3315 - RNA, 21 nt, synthetic construct
  source 1..21: mol_type = other RNA
gtagctagagactgcctggat

SEQ ID NO: 3316 - RNA, 21 nt, synthetic construct
  source 1..21: mol_type = other RNA
tccaggcagtctctagctacc

SEQ ID NO: 3317 - RNA, 21 nt, synthetic construct
  source 1..21: mol_type = other RNA
ggtagctagagactgcctgga

SEQ ID NO: 3318 - RNA, 21 nt, synthetic construct
  source 1..21: mol_type = other RNA
ccaggcagtctctagctacct

SEQ ID NO: 3319 - RNA, 21 nt, synthetic construct
  source 1..21: mol_type = other RNA
aggtagctagagactgcctgg

SEQ ID NO: 3320 - RNA, 21 nt, synthetic construct
  source 1..21: mol_type = other RNA
aggcagtctctagctacctgg

SEQ ID NO: 3321 - RNA, 21 nt, synthetic construct
  source 1..21: mol_type = other RNA
ccaggtagctagagactgcct

SEQ ID NO: 3322 - RNA, 21 nt, synthetic construct
  source 1..21: mol_type = other RNA
ggcagtctctagctacctggc

SEQ ID NO: 3323 - RNA, 21 nt, synthetic construct
  source 1..21: mol_type = other RNA
gccaggtagctagagactgcc

SEQ ID NO: 3324 - RNA, 21 nt, synthetic construct
  source 1..21: mol_type = other RNA
gcagtctctagctacctggca

SEQ ID NO: 3325 - RNA, 21 nt, synthetic construct
  source 1..21: mol_type = other RNA
tgccaggtagctagagactgc

SEQ ID NO: 3326 - RNA, 21 nt, synthetic construct
  source 1..21: mol_type = other RNA
cagtctctagctacctggcac

SEQ ID NO: 3327 - RNA, 21 nt, synthetic construct
  source 1..21: mol_type = other RNA
gtgccaggtagctagagactg

SEQ ID NO: 3328 - RNA, 21 nt, synthetic construct
  source 1..21: mol_type = other RNA
agtctctagctacctggcacc

SEQ ID NO: 3329 - RNA, 21 nt, synthetic construct
  source 1..21: mol_type = other RNA
ggtgccaggtagctagagact

SEQ ID NO: 3330 - RNA, 21 nt, synthetic construct
  source 1..21: mol_type = other RNA
gtctctagctacctggcaccg

SEQ ID NO: 3331 - RNA, 21 nt, synthetic construct
  source 1..21: mol_type = other RNA
cggtgccaggtagctagagac

SEQ ID NO: 3332 - RNA, 21 nt, synthetic construct
  source 1..21: mol_type = other RNA
tctctagctacctggcaccgc

SEQ ID NO: 3333 - RNA, 21 nt, synthetic construct
  source 1..21: mol_type = other RNA
gcggtgccaggtagctagaga

SEQ ID NO: 3334 - RNA, 21 nt, synthetic construct
  source 1..21: mol_type = other RNA
cgtcttcgtgctggcgctctt

SEQ ID NO: 3335 - RNA, 21 nt, synthetic construct
  source 1..21: mol_type = other RNA
aagagcgccagcacgaagacg

SEQ ID NO: 3336 - RNA, 21 nt, synthetic construct
  source 1..21: mol_type = other RNA
gtcttcgtgctggcgctcttc

SEQ ID NO: 3337 - RNA, 21 nt, synthetic construct
  source 1..21: mol_type = other RNA
gaagagcgccagcacgaagac

SEQ ID NO: 3338 - RNA, 21 nt, synthetic construct
  source 1..21: mol_type = other RNA
tcttcgtgctggcgctcttcg

SEQ ID NO: 3339 - RNA, 21 nt, synthetic construct
  source 1..21: mol_type = other RNA
cgaagagcgccagcacgaaga

SEQ ID NO: 3340 - RNA, 21 nt, synthetic construct
  source 1..21: mol_type = other RNA
cttcgtgctggcgctcttcgt

SEQ ID NO: 3341 - RNA, 21 nt, synthetic construct
  source 1..21: mol_type = other RNA
acgaagagcgccagcacgaag

SEQ ID NO: 3342 - RNA, 21 nt, synthetic construct
  source 1..21: mol_type = other RNA
ttcgtgctggcgctcttcgtg

SEQ ID NO: 3343 - RNA, 21 nt, synthetic construct
  source 1..21: mol_type = other RNA
cacgaagagcgccagcacgaa

SEQ ID NO: 3344 - RNA, 21 nt, synthetic construct
  source 1..21: mol_type = other RNA
atgggcctggcacgcctgatt

SEQ ID NO: 3345 - RNA, 21 nt, synthetic construct
  source 1..21: mol_type = other RNA
aatcaggcgtgccaggcccat

SEQ ID NO: 3346 - RNA, 21 nt, synthetic construct
  source 1..21: mol_type = other RNA
tggcacgcctgattcccgagt

SEQ ID NO: 3347 - RNA, 21 nt, synthetic construct
  source 1..21: mol_type = other RNA
actcgggaatcaggcgtgcca

SEQ ID NO: 3348 - RNA, 21 nt, synthetic construct
  source 1..21: mol_type = other RNA
ggcacgcctgattcccgagtt

SEQ ID NO: 3349 - RNA, 21 nt, synthetic construct
  source 1..21: mol_type = other RNA
aactcgggaatcaggcgtgcc

SEQ ID NO: 3350 - RNA, 21 nt, synthetic construct
  source 1..21: mol_type = other RNA
gcacgcctgattcccgagttc

SEQ ID NO: 3351 - RNA, 21 nt, synthetic construct
  source 1..21: mol_type = other RNA
gaactcgggaatcaggcgtgc

SEQ ID NO: 3352 - RNA, 21 nt, synthetic construct
  source 1..21: mol_type = other RNA
cacgcctgattcccgagttct

SEQ ID NO: 3353 - RNA, 21 nt, synthetic construct
  source 1..21: mol_type = other RNA
agaactcgggaatcaggcgtg

SEQ ID NO: 3354 - RNA, 21 nt, synthetic construct
  source 1..21: mol_type = other RNA
acgcctgattcccgagttctc

SEQ ID NO: 3355 - RNA, 21 nt, synthetic construct
  source 1..21: mol_type = other RNA
gagaactcgggaatcaggcgt

SEQ ID NO: 3356 - RNA, 21 nt, synthetic construct
  source 1..21: mol_type = other RNA
cgcctgattcccgagttctcc

SEQ ID NO: 3357 - RNA, 21 nt, synthetic construct
  source 1..21: mol_type = other RNA
ggagaactcgggaatcaggcg

SEQ ID NO: 3358 - RNA, 21 nt, synthetic construct
  source 1..21: mol_type = other RNA
gcctgattcccgagttctcct

SEQ ID NO: 3359 - RNA, 21 nt, synthetic construct
  source 1..21: mol_type = other RNA
aggagaactcgggaatcaggc

SEQ ID NO: 3360 - RNA, 21 nt, synthetic construct
  source 1..21: mol_type = other RNA
cctgattcccgagttctcctt

SEQ ID NO: 3361 - RNA, 21 nt, synthetic construct
  source 1..21: mol_type = other RNA
aaggagaactcgggaatcagg

SEQ ID NO: 3362 - RNA, 21 nt, synthetic construct
  source 1..21: mol_type = other RNA
ctgattcccgagttctccttc

SEQ ID NO: 3363 - RNA, 21 nt, synthetic construct
  source 1..21: mol_type = other RNA
gaaggagaactcgggaatcag

SEQ ID NO: 3364 - RNA, 21 nt, synthetic construct
  source 1..21: mol_type = other RNA
tgattcccgagttctccttcg

SEQ ID NO: 3365 - RNA, 21 nt, synthetic construct
  source 1..21: mol_type = other RNA
cgaaggagaactcgggaatca

SEQ ID NO: 3366 - RNA, 21 nt, synthetic construct
  source 1..21: mol_type = other RNA
agttctccttcggctcgggca

SEQ ID NO: 3367 - RNA, 21 nt, synthetic construct
  source 1..21: mol_type = other RNA
tgcccgagccgaaggagaact

SEQ ID NO: 3368 - RNA, 21 nt, synthetic construct
  source 1..21: mol_type = other RNA
cggcgtgcactacctctactt

SEQ ID NO: 3369 - RNA, 21 nt, synthetic construct
  source 1..21: mol_type = other RNA
aagtagaggtagtgcacgccg

SEQ ID NO: 3370 - RNA, 21 nt, synthetic construct
  source 1..21: mol_type = other RNA
ggcgtgcactacctctacttc

SEQ ID NO: 3371 - RNA, 21 nt, synthetic construct
  source 1..21: mol_type = other RNA
gaagtagaggtagtgcacgcc

SEQ ID NO: 3372 - RNA, 21 nt, synthetic construct
  source 1..21: mol_type = other RNA
gcgtgcactacctctacttcg

SEQ ID NO: 3373 - RNA, 21 nt, synthetic construct
  source 1..21: mol_type = other RNA
cgaagtagaggtagtgcacgc

SEQ ID NO: 3374 - RNA, 21 nt, synthetic construct
  source 1..21: mol_type = other RNA
cgtgcactacctctacttcgc

SEQ ID NO: 3375 - RNA, 21 nt, synthetic construct
  source 1..21: mol_type = other RNA
gcgaagtagaggtagtgcacg

SEQ ID NO: 3376 - RNA, 21 nt, synthetic construct
  source 1..21: mol_type = other RNA
gtgcactacctctacttcgcc

SEQ ID NO: 3377 - RNA, 21 nt, synthetic construct
  source 1..21: mol_type = other RNA
ggcgaagtagaggtagtgcac

SEQ ID NO: 3378 - RNA, 21 nt, synthetic construct
  source 1..21: mol_type = other RNA
tgcactacctctacttcgcca

SEQ ID NO: 3379 - RNA, 21 nt, synthetic construct
  source 1..21: mol_type = other RNA
tggcgaagtagaggtagtgca

SEQ ID NO: 3380 - RNA, 21 nt, synthetic construct
  source 1..21: mol_type = other RNA
gcactacctctacttcgccat

SEQ ID NO: 3381 - RNA, 21 nt, synthetic construct
  source 1..21: mol_type = other RNA
atggcgaagtagaggtagtgc

SEQ ID NO: 3382 - RNA, 21 nt, synthetic construct
  source 1..21: mol_type = other RNA
cactacctctacttcgccatt

SEQ ID NO: 3383 - RNA, 21 nt, synthetic construct
  source 1..21: mol_type = other RNA
aatggcgaagtagaggtagtg

SEQ ID NO: 3384 - RNA, 21 nt, synthetic construct
  source 1..21: mol_type = other RNA
actacctctacttcgccattg

SEQ ID NO: 3385 - RNA, 21 nt, synthetic construct
  source 1..21: mol_type = other RNA
caatggcgaagtagaggtagt

SEQ ID NO: 3386 - RNA, 21 nt, synthetic construct
  source 1..21: mol_type = other RNA
ctacctctacttcgccattgt

SEQ ID NO: 3387 - RNA, 21 nt, synthetic construct
  source 1..21: mol_type = other RNA
acaatggcgaagtagaggtag

SEQ ID NO: 3388 - RNA, 21 nt, synthetic construct
  source 1..21: mol_type = other RNA
tacctctacttcgccattgtg

SEQ ID NO: 3389 - RNA, 21 nt, synthetic construct
  source 1..21: mol_type = other RNA
cacaatggcgaagtagaggta

SEQ ID NO: 3390 - RNA, 21 nt, synthetic construct
  source 1..21: mol_type = other RNA
acctctacttcgccattgtgc

SEQ ID NO: 3391 - RNA, 21 nt, synthetic construct
  source 1..21: mol_type = other RNA
gcacaatggcgaagtagaggt

SEQ ID NO: 3392 - RNA, 21 nt, synthetic construct
  source 1..21: mol_type = other RNA
cctctacttcgccattgtgct

SEQ ID NO: 3393 - RNA, 21 nt, synthetic construct
  source 1..21: mol_type = other RNA
agcacaatggcgaagtagagg

SEQ ID NO: 3394 - RNA, 21 nt, synthetic construct
  source 1..21: mol_type = other RNA
ctctacttcgccattgtgctg

SEQ ID NO: 3395 - RNA, 21 nt, synthetic construct
  source 1..21: mol_type = other RNA
cagcacaatggcgaagtagag

SEQ ID NO: 3396 - RNA, 21 nt, synthetic construct
  source 1..21: mol_type = other RNA
tctacttcgccattgtgctgt

SEQ ID NO: 3397 - RNA, 21 nt, synthetic construct
  source 1..21: mol_type = other RNA
acagcacaatggcgaagtaga

SEQ ID NO: 3398 - RNA, 21 nt, synthetic construct
  source 1..21: mol_type = other RNA
ctacttcgccattgtgctgtt

SEQ ID NO: 3399 - RNA, 21 nt, synthetic construct
  source 1..21: mol_type = other RNA
aacagcacaatggcgaagtag

SEQ ID NO: 3400 - RNA, 21 nt, synthetic construct
  source 1..21: mol_type = other RNA
tacttcgccattgtgctgttc

SEQ ID NO: 3401 - RNA, 21 nt, synthetic construct
  source 1..21: mol_type = other RNA
gaacagcacaatggcgaagta

SEQ ID NO: 3402 - RNA, 21 nt, synthetic construct
  source 1..21: mol_type = other RNA
acttcgccattgtgctgttct

SEQ ID NO: 3403 - RNA, 21 nt, synthetic construct
  source 1..21: mol_type = other RNA
agaacagcacaatggcgaagt

SEQ ID NO: 3404 - RNA, 21 nt, synthetic construct
  source 1..21: mol_type = other RNA
cttcgccattgtgctgttctt

SEQ ID NO: 3405 - RNA, 21 nt, synthetic construct
  source 1..21: mol_type = other RNA
aagaacagcacaatggcgaag

SEQ ID NO: 3406 - RNA, 21 nt, synthetic construct
  source 1..21: mol_type = other RNA
ttcgccattgtgctgttcttc

SEQ ID NO: 3407 - RNA, 21 nt, synthetic construct
  source 1..21: mol_type = other RNA
gaagaacagcacaatggcgaa

SEQ ID NO: 3408 - RNA, 21 nt, synthetic construct
  source 1..21: mol_type = other RNA
tcgccattgtgctgttcttct

SEQ ID NO: 3409 - RNA, 21 nt, synthetic construct
  source 1..21: mol_type = other RNA
agaagaacagcacaatggcga

SEQ ID NO: 3410 - RNA, 21 nt, synthetic construct
  source 1..21: mol_type = other RNA
cgccattgtgctgttcttctg

SEQ ID NO: 3411 - RNA, 21 nt, synthetic construct
  source 1..21: mol_type = other RNA
cagaagaacagcacaatggcg

SEQ ID NO: 3412 - RNA, 21 nt, synthetic construct
  source 1..21: mol_type = other RNA
gccattgtgctgttcttctgc

SEQ ID NO: 3413 - RNA, 21 nt, synthetic construct
  source 1..21: mol_type = other RNA
gcagaagaacagcacaatggc

SEQ ID NO: 3414 - RNA, 21 nt, synthetic construct
  source 1..21: mol_type = other RNA
ccattgtgctgttcttctgct

SEQ ID NO: 3415 - RNA, 21 nt, synthetic construct
  source 1..21: mol_type = other RNA
agcagaagaacagcacaatgg

SEQ ID NO: 3416 - RNA, 21 nt, synthetic construct
  source 1..21: mol_type = other RNA
cattgtgctgttcttctgctc

SEQ ID NO: 3417 - RNA, 21 nt, synthetic construct
  source 1..21: mol_type = other RNA
gagcagaagaacagcacaatg

SEQ ID NO: 3418 - RNA, 21 nt, synthetic construct
  source 1..21: mol_type = other RNA
attgtgctgttcttctgctct

SEQ ID NO: 3419 - RNA, 21 nt, synthetic construct
  source 1..21: mol_type = other RNA
agagcagaagaacagcacaat

SEQ ID NO: 3420 - RNA, 21 nt, synthetic construct
  source 1..21: mol_type = other RNA
ttgtgctgttcttctgctctg

SEQ ID NO: 3421 - RNA, 21 nt, synthetic construct
  source 1..21: mol_type = other RNA
cagagcagaagaacagcacaa

SEQ ID NO: 3422 - RNA, 21 nt, synthetic construct
  source 1..21: mol_type = other RNA
tgtgctgttcttctgctctgg

SEQ ID NO: 3423 - RNA, 21 nt, synthetic construct
  source 1..21: mol_type = other RNA
ccagagcagaagaacagcaca

SEQ ID NO: 3424 - RNA, 21 nt, synthetic construct
  source 1..21: mol_type = other RNA
gtgctgttcttctgctctggc

SEQ ID NO: 3425 - RNA, 21 nt, synthetic construct
  source 1..21: mol_type = other RNA
gccagagcagaagaacagcac

SEQ ID NO: 3426 - RNA, 21 nt, synthetic construct
  source 1..21: mol_type = other RNA
ctgttcttctgctctggcctc

SEQ ID NO: 3427 - RNA, 21 nt, synthetic construct
  source 1..21: mol_type = other RNA
gaggccagagcagaagaacag

SEQ ID NO: 3428 - RNA, 21 nt, synthetic construct
  source 1..21: mol_type = other RNA
tgttcttctgctctggcctcc

SEQ ID NO: 3429 - RNA, 21 nt, synthetic construct
  source 1..21: mol_type = other RNA
ggaggccagagcagaagaaca

SEQ ID NO: 3430 - RNA, 21 nt, synthetic construct
  source 1..21: mol_type = other RNA
gttcttctgctctggcctcct

SEQ ID NO: 3431 - RNA, 21 nt, synthetic construct
  source 1..21: mol_type = other RNA
aggaggccagagcagaagaac

SEQ ID NO: 3432 - RNA, 21 nt, synthetic construct
  source 1..21: mol_type = other RNA
ttcttctgctctggcctcctc

SEQ ID NO: 3433 - RNA, 21 nt, synthetic construct
  source 1..21: mol_type = other RNA
gaggaggccagagcagaagaa

SEQ ID NO: 3434 - RNA, 21 nt, synthetic construct
  source 1..21: mol_type = other RNA
tcttctgctctggcctcctca

SEQ ID NO: 3435 - RNA, 21 nt, synthetic construct
  source 1..21: mol_type = other RNA
tgaggaggccagagcagaaga

SEQ ID NO: 3436 - RNA, 21 nt, synthetic construct
  source 1..21: mol_type = other RNA
cttctgctctggcctcctcac

SEQ ID NO: 3437 - RNA, 21 nt, synthetic construct
  source 1..21: mol_type = other RNA
gtgaggaggccagagcagaag

SEQ ID NO: 3438 - RNA, 21 nt, synthetic construct
  source 1..21: mol_type = other RNA
ttctgctctggcctcctcacc

SEQ ID NO: 3439 - RNA, 21 nt, synthetic construct
  source 1..21: mol_type = other RNA
ggtgaggaggccagagcagaa

SEQ ID NO: 3440 - RNA, 21 nt, synthetic construct
  source 1..21: mol_type = other RNA
aaagcacctccaccgcctggt

SEQ ID NO: 3441 - RNA, 21 nt, synthetic construct
  source 1..21: mol_type = other RNA
accaggcggtggaggtgcttt

SEQ ID NO: 3442 - RNA, 21 nt, synthetic construct
  source 1..21: mol_type = other RNA
acctccaccgcctggtcttca

SEQ ID NO: 3443 - RNA, 21 nt, synthetic construct
  source 1..21: mol_type = other RNA
tgaagaccaggcggtggaggt

SEQ ID NO: 3444 - RNA, 21 nt, synthetic construct
  source 1..21: mol_type = other RNA
ctccaccgcctggtcttcagt

SEQ ID NO: 3445 - RNA, 21 nt, synthetic construct
  source 1..21: mol_type = other RNA
actgaagaccaggcggtggag

SEQ ID NO: 3446 - RNA, 21 nt, synthetic construct
  source 1..21: mol_type = other RNA
tccaccgcctggtcttcagtc

SEQ ID NO: 3447 - RNA, 21 nt, synthetic construct
  source 1..21: mol_type = other RNA
gactgaagaccaggcggtgga

SEQ ID NO: 3448 - RNA, 21 nt, synthetic construct
  source 1..21: mol_type = other RNA
ccaccgcctggtcttcagtct

SEQ ID NO: 3449 - RNA, 21 nt, synthetic construct
  source 1..21: mol_type = other RNA
agactgaagaccaggcggtgg

SEQ ID NO: 3450 - RNA, 21 nt, synthetic construct
  source 1..21: mol_type = other RNA
caccgcctggtcttcagtctc

SEQ ID NO: 3451 - RNA, 21 nt, synthetic construct
  source 1..21: mol_type = other RNA
gagactgaagaccaggcggtg

SEQ ID NO: 3452 - RNA, 21 nt, synthetic construct
  source 1..21: mol_type = other RNA
accgcctggtcttcagtctcc

SEQ ID NO: 3453 - RNA, 21 nt, synthetic construct
  source 1..21: mol_type = other RNA
ggagactgaagaccaggcggt

SEQ ID NO: 3454 - RNA, 21 nt, synthetic construct
  source 1..21: mol_type = other RNA
cctggtcttcagtctccggca

SEQ ID NO: 3455 - RNA, 21 nt, synthetic construct
  source 1..21: mol_type = other RNA
tgccggagactgaagaccagg

SEQ ID NO: 3456 - RNA, 21 nt, synthetic construct
  source 1..21: mol_type = other RNA
ctggtcttcagtctccggcat

SEQ ID NO: 3457 - RNA, 21 nt, synthetic construct
  source 1..21: mol_type = other RNA
atgccggagactgaagaccag

SEQ ID NO: 3458 - RNA, 21 nt, synthetic construct
  source 1..21: mol_type = other RNA
tggtcttcagtctccggcata

SEQ ID NO: 3459 - RNA, 21 nt, synthetic construct
  source 1..21: mol_type = other RNA
tatgccggagactgaagacca

SEQ ID NO: 3460 - RNA, 21 nt, synthetic construct
  source 1..21: mol_type = other RNA
ggtcttcagtctccggcatag

SEQ ID NO: 3461 - RNA, 21 nt, synthetic construct
  source 1..21: mol_type = other RNA
ctatgccggagactgaagacc

SEQ ID NO: 3462 - RNA, 21 nt, synthetic construct
  source 1..21: mol_type = other RNA
gtcttcagtctccggcatagc

SEQ ID NO: 3463 - RNA, 21 nt, synthetic construct
  source 1..21: mol_type = other RNA
gctatgccggagactgaagac

SEQ ID NO: 3464 - RNA, 21 nt, synthetic construct
  source 1..21: mol_type = other RNA
tcttcagtctccggcatagca

SEQ ID NO: 3465 - RNA, 21 nt, synthetic construct
  source 1..21: mol_type = other RNA
tgctatgccggagactgaaga

SEQ ID NO: 3466 - RNA, 21 nt, synthetic construct
  source 1..21: mol_type = other RNA
cttcagtctccggcatagcaa

SEQ ID NO: 3467 - RNA, 21 nt, synthetic construct
  source 1..21: mol_type = other RNA
ttgctatgccggagactgaag

SEQ ID NO: 3468 - RNA, 21 nt, synthetic construct
  source 1..21: mol_type = other RNA
ttcagtctccggcatagcaag

SEQ ID NO: 3469 - RNA, 21 nt, synthetic construct
  source 1..21: mol_type = other RNA
cttgctatgccggagactgaa

SEQ ID NO: 3470 - RNA, 21 nt, synthetic construct
  source 1..21: mol_type = other RNA
tcagtctccggcatagcaagg

SEQ ID NO: 3471 - RNA, 21 nt, synthetic construct
  source 1..21: mol_type = other RNA
ccttgctatgccggagactga

SEQ ID NO: 3472 - RNA, 21 nt, synthetic construct
  source 1..21: mol_type = other RNA
cagtctccggcatagcaagga

SEQ ID NO: 3473 - RNA, 21 nt, synthetic construct
  source 1..21: mol_type = other RNA
tccttgctatgccggagactg

SEQ ID NO: 3474 - RNA, 21 nt, synthetic construct
  source 1..21: mol_type = other RNA
aacgggaggacctggatgctg

SEQ ID NO: 3475 - RNA, 21 nt, synthetic construct
  source 1..21: mol_type = other RNA
cagcatccaggtcctcccgtt

SEQ ID NO: 3476 - RNA, 21 nt, synthetic construct
  source 1..21: mol_type = other RNA
acgggaggacctggatgctga

SEQ ID NO: 3477 - RNA, 21 nt, synthetic construct
  source 1..21: mol_type = other RNA
tcagcatccaggtcctcccgt

SEQ ID NO: 3478 - RNA, 21 nt, synthetic construct
  source 1..21: mol_type = other RNA
cgggaggacctggatgctgat

SEQ ID NO: 3479 - RNA, 21 nt, synthetic construct
  source 1..21: mol_type = other RNA
atcagcatccaggtcctcccg

SEQ ID NO: 3480 - RNA, 21 nt, synthetic construct
  source 1..21: mol_type = other RNA
gggaggacctggatgctgatg

SEQ ID NO: 3481 - RNA, 21 nt, synthetic construct
  source 1..21: mol_type = other RNA
catcagcatccaggtcctccc

SEQ ID NO: 3482 - RNA, 21 nt, synthetic construct
  source 1..21: mol_type = other RNA
ggaggacctggatgctgatga

SEQ ID NO: 3483 - RNA, 21 nt, synthetic construct
  source 1..21: mol_type = other RNA
tcatcagcatccaggtcctcc

SEQ ID NO: 3484 - RNA, 21 nt, synthetic construct
  source 1..21: mol_type = other RNA
gaggacctggatgctgatgag

SEQ ID NO: 3485 - RNA, 21 nt, synthetic construct
  source 1..21: mol_type = other RNA
ctcatcagcatccaggtcctc

SEQ ID NO: 3486 - RNA, 21 nt, synthetic construct
  source 1..21: mol_type = other RNA
aggacctggatgctgatgagc

SEQ ID NO: 3487 - RNA, 21 nt, synthetic construct
  source 1..21: mol_type = other RNA
gctcatcagcatccaggtcct

SEQ ID NO: 3488 - RNA, 21 nt, synthetic construct
  source 1..21: mol_type = other RNA
agcagcaaggctcctcactcc

SEQ ID NO: 3489 - RNA, 21 nt, synthetic construct
  source 1..21: mol_type = other RNA
ggagtgaggagccttgctgct

SEQ ID NO: 3490 - RNA, 21 nt, synthetic construct
  source 1..21: mol_type = other RNA
cagcaaggctcctcactccct

SEQ ID NO: 3491 - RNA, 21 nt, synthetic construct
  source 1..21: mol_type = other RNA
agggagtgaggagccttgctg

SEQ ID NO: 3492 - RNA, 21 nt, synthetic construct
  source 1..21: mol_type = other RNA
agcaaggctcctcactccctg

SEQ ID NO: 3493 - RNA, 21 nt, synthetic construct
  source 1..21: mol_type = other RNA
cagggagtgaggagccttgct

SEQ ID NO: 3494 - RNA, 21 nt, synthetic construct
  source 1..21: mol_type = other RNA
gcaaggctcctcactccctgt

SEQ ID NO: 3495 - RNA, 21 nt, synthetic construct
  source 1..21: mol_type = other RNA
acagggagtgaggagccttgc

SEQ ID NO: 3496 - RNA, 21 nt, synthetic construct
  source 1..21: mol_type = other RNA
caaggctcctcactccctgta

SEQ ID NO: 3497 - RNA, 21 nt, synthetic construct
  source 1..21: mol_type = other RNA
tacagggagtgaggagccttg

SEQ ID NO: 3498 - RNA, 21 nt, synthetic construct
  source 1..21: mol_type = other RNA
aaggctcctcactccctgtac

SEQ ID NO: 3499 - RNA, 21 nt, synthetic construct
  source 1..21: mol_type = other RNA
gtacagggagtgaggagcctt

SEQ ID NO: 3500 - RNA, 21 nt, synthetic construct
  source 1..21: mol_type = other RNA
aggctcctcactccctgtaca

SEQ ID NO: 3501 - RNA, 21 nt, synthetic construct
  source 1..21: mol_type = other RNA
tgtacagggagtgaggagcct

SEQ ID NO: 3502 - RNA, 21 nt, synthetic construct
  source 1..21: mol_type = other RNA
ggctcctcactccctgtacag

SEQ ID NO: 3503 - RNA, 21 nt, synthetic construct
  source 1..21: mol_type = other RNA
ctgtacagggagtgaggagcc

SEQ ID NO: 3504 - RNA, 21 nt, synthetic construct
  source 1..21: mol_type = other RNA
gctcctcactccctgtacaga

SEQ ID NO: 3505 - RNA, 21 nt, synthetic construct
  source 1..21: mol_type = other RNA
tctgtacagggagtgaggagc

SEQ ID NO: 3506 - RNA, 21 nt, synthetic construct
  source 1..21: mol_type = other RNA
ctcctcactccctgtacagaa

SEQ ID NO: 3507 - RNA, 21 nt, synthetic construct
  source 1..21: mol_type = other RNA
ttctgtacagggagtgaggag

SEQ ID NO: 3508 - RNA, 21 nt, synthetic construct
  source 1..21: mol_type = other RNA
tcctcactccctgtacagaat

SEQ ID NO: 3509 - RNA, 21 nt, synthetic construct
  source 1..21: mol_type = other RNA
attctgtacagggagtgagga

SEQ ID NO: 3510 - RNA, 21 nt, synthetic construct
  source 1..21: mol_type = other RNA
cctcactccctgtacagaatg

SEQ ID NO: 3511 - RNA, 21 nt, synthetic construct
  source 1..21: mol_type = other RNA
cattctgtacagggagtgagg

SEQ ID NO: 3512 - RNA, 21 nt, synthetic construct
  source 1..21: mol_type = other RNA
ctcactccctgtacagaatgg

SEQ ID NO: 3513 - RNA, 21 nt, synthetic construct
  source 1..21: mol_type = other RNA
ccattctgtacagggagtgag

SEQ ID NO: 3514 - RNA, 21 nt, synthetic construct
  source 1..21: mol_type = other RNA
tcactccctgtacagaatggg

SEQ ID NO: 3515 - RNA, 21 nt, synthetic construct
  source 1..21: mol_type = other RNA
cccattctgtacagggagtga

SEQ ID NO: 3516 - RNA, 21 nt, synthetic construct
  source 1..21: mol_type = other RNA
cactccctgtacagaatgggt

SEQ ID NO: 3517 - RNA, 21 nt, synthetic construct
  source 1..21: mol_type = other RNA
acccattctgtacagggagtg

SEQ ID NO: 3518 - RNA, 21 nt, synthetic construct
  source 1..21: mol_type = other RNA
actccctgtacagaatgggtg

SEQ ID NO: 3519 - RNA, 21 nt, synthetic construct
  source 1..21: mol_type = other RNA
cacccattctgtacagggagt

SEQ ID NO: 3520 - RNA, 21 nt, synthetic construct
  source 1..21: mol_type = other RNA
ctccctgtacagaatgggtgc

SEQ ID NO: 3521 - RNA, 21 nt, synthetic construct
  source 1..21: mol_type = other RNA
gcacccattctgtacagggag

SEQ ID NO: 3522 - RNA, 21 nt, synthetic construct
  source 1..21: mol_type = other RNA
tccctgtacagaatgggtgcc

SEQ ID NO: 3523 - RNA, 21 nt, synthetic construct
  source 1..21: mol_type = other RNA
ggcacccattctgtacaggga

SEQ ID NO: 3524 - RNA, 21 nt, synthetic construct
  source 1..21: mol_type = other RNA
ccctgtacagaatgggtgccc

SEQ ID NO: 3525 - RNA, 21 nt, synthetic construct
  source 1..21: mol_type = other RNA
gggcacccattctgtacaggg

SEQ ID NO: 3526 - RNA, 21 nt, synthetic construct
  source 1..21: mol_type = other RNA
cctgtacagaatgggtgccca

SEQ ID NO: 3527 - RNA, 21 nt, synthetic construct
  source 1..21: mol_type = other RNA
tgggcacccattctgtacagg

SEQ ID NO: 3528 - RNA, 21 nt, synthetic construct
  source 1..21: mol_type = other RNA
ctgtacagaatgggtgcccag

SEQ ID NO: 3529 - RNA, 21 nt, synthetic construct
  source 1..21: mol_type = other RNA
ctgggcacccattctgtacag

SEQ ID NO: 3530 - RNA, 21 nt, synthetic construct
  source 1..21: mol_type = other RNA
tgtacagaatgggtgcccaga

SEQ ID NO: 3531 - RNA, 21 nt, synthetic construct
  source 1..21: mol_type = other RNA
tctgggcacccattctgtaca

SEQ ID NO: 3532 - RNA, 21 nt, synthetic construct
  source 1..21: mol_type = other RNA
gtacagaatgggtgcccagag

SEQ ID NO: 3533 - RNA, 21 nt, synthetic construct
  source 1..21: mol_type = other RNA
ctctgggcacccattctgtac

SEQ ID NO: 3534 - RNA, 21 nt, synthetic construct
  source 1..21: mol_type = other RNA
agatgaatgagccccaggccc

SEQ ID NO: 3535 - RNA, 21 nt, synthetic construct
  source 1..21: mol_type = other RNA
gggcctggggctcattcatct

SEQ ID NO: 3536 - RNA, 21 nt, synthetic construct
  source 1..21: mol_type = other RNA
caccaagcctcttccgccagt

SEQ ID NO: 3537 - RNA, 21 nt, synthetic construct
  source 1..21: mol_type = other RNA
actggcggaagaggcttggtg

SEQ ID NO: 3538 - RNA, 21 nt, synthetic construct
  source 1..21: mol_type = other RNA
accaagcctcttccgccagtg

SEQ ID NO: 3539 - RNA, 21 nt, synthetic construct
  source 1..21: mol_type = other RNA
cactggcggaagaggcttggt

SEQ ID NO: 3540 - RNA, 21 nt, synthetic construct
  source 1..21: mol_type = other RNA
aagcctcttccgccagtgcct

SEQ ID NO: 3541 - RNA, 21 nt, synthetic construct
  source 1..21: mol_type = other RNA
aggcactggcggaagaggctt

SEQ ID NO: 3542 - RNA, 21 nt, synthetic construct
  source 1..21: mol_type = other RNA
tcttccgccagtgcctgctct

SEQ ID NO: 3543 - RNA, 21 nt, synthetic construct
  source 1..21: mol_type = other RNA
agagcaggcactggcggaaga

SEQ ID NO: 3544 - RNA, 21 nt, synthetic construct
  source 1..21: mol_type = other RNA
cagtgcctgctctggttttgt

SEQ ID NO: 3545 - RNA, 21 nt, synthetic construct
  source 1..21: mol_type = other RNA
acaaaaccagagcaggcactg

SEQ ID NO: 3546 - RNA, 21 nt, synthetic construct
  source 1..21: mol_type = other RNA
agtgcctgctctggttttgtg

SEQ ID NO: 3547 - RNA, 21 nt, synthetic construct
  source 1..21: mol_type = other RNA
cacaaaaccagagcaggcact

SEQ ID NO: 3548 - RNA, 21 nt, synthetic construct
  source 1..21: mol_type = other RNA
gtgcctgctctggttttgtgg

SEQ ID NO: 3549 - RNA, 21 nt, synthetic construct
  source 1..21: mol_type = other RNA
ccacaaaaccagagcaggcac

SEQ ID NO: 3550 - RNA, 21 nt, synthetic construct
  source 1..21: mol_type = other RNA
tgcctgctctggttttgtgga

SEQ ID NO: 3551 - RNA, 21 nt, synthetic construct
  source 1..21: mol_type = other RNA
tccacaaaaccagagcaggca

SEQ ID NO: 3552 - RNA, 21 nt, synthetic construct
  source 1..21: mol_type = other RNA
gcctgctctggttttgtggaa

SEQ ID NO: 3553 - RNA, 21 nt, synthetic construct
  source 1..21: mol_type = other RNA
ttccacaaaaccagagcaggc

SEQ ID NO: 3554 - RNA, 21 nt, synthetic construct
  source 1..21: mol_type = other RNA
cctgctctggttttgtggaat

SEQ ID NO: 3555 - RNA, 21 nt, synthetic construct
  source 1..21: mol_type = other RNA
attccacaaaaccagagcagg

SEQ ID NO: 3556 - RNA, 21 nt, synthetic construct
  source 1..21: mol_type = other RNA
ctgctctggttttgtggaatg

SEQ ID NO: 3557 - RNA, 21 nt, synthetic construct
  source 1..21: mol_type = other RNA
cattccacaaaaccagagcag

SEQ ID NO: 3558 - RNA, 21 nt, synthetic construct
  source 1..21: mol_type = other RNA
tgctctggttttgtggaatga

SEQ ID NO: 3559 - RNA, 21 nt, synthetic construct
  source 1..21: mol_type = other RNA
tcattccacaaaaccagagca

SEQ ID NO: 3560 - RNA, 21 nt, synthetic construct
  source 1..21: mol_type = other RNA
gctctggttttgtggaatgag

SEQ ID NO: 3561 - RNA, 21 nt, synthetic construct
  source 1..21: mol_type = other RNA
ctcattccacaaaaccagagc

SEQ ID NO: 3562 - RNA, 21 nt, synthetic construct
  source 1..21: mol_type = other RNA
ctctggttttgtggaatgagc

SEQ ID NO: 3563 - RNA, 21 nt, synthetic construct
  source 1..21: mol_type = other RNA
gctcattccacaaaaccagag

SEQ ID NO: 3564 - RNA, 21 nt, synthetic construct
  source 1..21: mol_type = other RNA
tctggttttgtggaatgagca

SEQ ID NO: 3565 - RNA, 21 nt, synthetic construct
  source 1..21: mol_type = other RNA
tgctcattccacaaaaccaga

SEQ ID NO: 3566 - RNA, 21 nt, synthetic construct
  source 1..21: mol_type = other RNA
ctggttttgtggaatgagcag

SEQ ID NO: 3567 - RNA, 21 nt, synthetic construct
  source 1..21: mol_type = other RNA
ctgctcattccacaaaaccag

SEQ ID NO: 3568 - RNA, 21 nt, synthetic construct
  source 1..21: mol_type = other RNA
tggttttgtggaatgagcaga

SEQ ID NO: 3569 - RNA, 21 nt, synthetic construct
  source 1..21: mol_type = other RNA
tctgctcattccacaaaacca

SEQ ID NO: 3570 - RNA, 21 nt, synthetic construct
  source 1..21: mol_type = other RNA
ggttttgtggaatgagcagag

SEQ ID NO: 3571 - RNA, 21 nt, synthetic construct
  source 1..21: mol_type = other RNA
ctctgctcattccacaaaacc

SEQ ID NO: 3572 - RNA, 21 nt, synthetic construct
  source 1..21: mol_type = other RNA
gttttgtggaatgagcagagg

SEQ ID NO: 3573 - RNA, 21 nt, synthetic construct
  source 1..21: mol_type = other RNA
cctctgctcattccacaaaac

SEQ ID NO: 3574 - RNA, 21 nt, synthetic construct
  source 1..21: mol_type = other RNA
ttttgtggaatgagcagaggt

SEQ ID NO: 3575 - RNA, 21 nt, synthetic construct
  source 1..21: mol_type = other RNA
acctctgctcattccacaaaa

SEQ ID NO: 3576 - RNA, 21 nt, synthetic construct
  source 1..21: mol_type = other RNA
tttgtggaatgagcagaggtg

SEQ ID NO: 3577 - RNA, 21 nt, synthetic construct
  source 1..21: mol_type = other RNA
cacctctgctcattccacaaa

SEQ ID NO: 3578 - RNA, 21 nt, synthetic construct
  source 1..21: mol_type = other RNA
ttgtggaatgagcagaggtgg

SEQ ID NO: 3579 - RNA, 21 nt, synthetic construct
  source 1..21: mol_type = other RNA
ccacctctgctcattccacaa

SEQ ID NO: 3580 - RNA, 21 nt, synthetic construct
  source 1..21: mol_type = other RNA
tgtggaatgagcagaggtggg

SEQ ID NO: 3581 - RNA, 21 nt, synthetic construct
  source 1..21: mol_type = other RNA
cccacctctgctcattccaca

SEQ ID NO: 3582 - RNA, 21 nt, synthetic construct
  source 1..21: mol_type = other RNA
gtggaatgagcagaggtgggg

SEQ ID NO: 3583 - RNA, 21 nt, synthetic construct
  source 1..21: mol_type = other RNA
ccccacctctgctcattccac

SEQ ID NO: 3584 - RNA, 21 nt, synthetic construct
  source 1..21: mol_type = other RNA
tggaatgagcagaggtggggt

SEQ ID NO: 3585 - RNA, 21 nt, synthetic construct
  source 1..21: mol_type = other RNA
accccacctctgctcattcca

SEQ ID NO: 3586 - RNA, 21 nt, synthetic construct
  source 1..21: mol_type = other RNA
ggaatgagcagaggtggggtg

SEQ ID NO: 3587 - RNA, 21 nt, synthetic construct
  source 1..21: mol_type = other RNA
caccccacctctgctcattcc

SEQ ID NO: 3588 - RNA, 21 nt, synthetic construct
  source 1..21: mol_type = other RNA
gaatgagcagaggtggggtgg

SEQ ID NO: 3589 - RNA, 21 nt, synthetic construct
  source 1..21: mol_type = other RNA
ccaccccacctctgctcattc

SEQ ID NO: 3590 - RNA, 21 nt, synthetic construct
  source 1..21: mol_type = other RNA
aatgagcagaggtggggtggg

SEQ ID NO: 3591 - RNA, 21 nt, synthetic construct
  source 1..21: mol_type = other RNA
cccaccccacctctgctcatt

SEQ ID NO: 3592 - RNA, 21 nt, synthetic construct
  source 1..21: mol_type = other RNA
ctggaggacatcagcgaggac

SEQ ID NO: 3593 - RNA, 21 nt, synthetic construct
  source 1..21: mol_type = other RNA
gtcctcgctgatgtcctccag

SEQ ID NO: 3594 - RNA, 21 nt, synthetic construct
  source 1..21: mol_type = other RNA
tggaggacatcagcgaggacc

SEQ ID NO: 3595 - RNA, 21 nt, synthetic construct
  source 1..21: mol_type = other RNA
ggtcctcgctgatgtcctcca

SEQ ID NO: 3596 - RNA, 21 nt, synthetic construct
  source 1..21: mol_type = other RNA
aggacatcagcgaggacccga

SEQ ID NO: 3597 - RNA, 21 nt, synthetic construct
  source 1..21: mol_type = other RNA
tcgggtcctcgctgatgtcct

SEQ ID NO: 3598 - RNA, 21 nt, synthetic construct
  source 1..21: mol_type = other RNA
acatcagcgaggacccgagct

SEQ ID NO: 3599 - RNA, 21 nt, synthetic construct
  source 1..21: mol_type = other RNA
agctcgggtcctcgctgatgt

SEQ ID NO: 3600 - RNA, 21 nt, synthetic construct
  source 1..21: mol_type = other RNA
cctcaatgccctgctcatgat

SEQ ID NO: 3601 - RNA, 21 nt, synthetic construct
  source 1..21: mol_type = other RNA
atcatgagcagggcattgagg

SEQ ID NO: 3602 - RNA, 21 nt, synthetic construct
  source 1..21: mol_type = other RNA
ctcaatgccctgctcatgatg

SEQ ID NO: 3603 - RNA, 21 nt, synthetic construct
  source 1..21: mol_type = other RNA
catcatgagcagggcattgag

SEQ ID NO: 3604 - RNA, 21 nt, synthetic construct
  source 1..21: mol_type = other RNA
tcaatgccctgctcatgatgg

SEQ ID NO: 3605 - RNA, 21 nt, synthetic construct
  source 1..21: mol_type = other RNA
ccatcatgagcagggcattga

SEQ ID NO: 3606 - RNA, 21 nt, synthetic construct
  source 1..21: mol_type = other RNA
caatgccctgctcatgatggc

SEQ ID NO: 3607 - RNA, 21 nt, synthetic construct
  source 1..21: mol_type = other RNA
gccatcatgagcagggcattg

SEQ ID NO: 3608 - RNA, 21 nt, synthetic construct
  source 1..21: mol_type = other RNA
tgctcatgatggcagtggccg

SEQ ID NO: 3609 - RNA, 21 nt, synthetic construct
  source 1..21: mol_type = other RNA
cggccactgccatcatgagca

SEQ ID NO: 3610 - RNA, 21 nt, synthetic construct
  source 1..21: mol_type = other RNA
gctcatgatggcagtggccgt

SEQ ID NO: 3611 - RNA, 21 nt, synthetic construct
  source 1..21: mol_type = other RNA
acggccactgccatcatgagc

SEQ ID NO: 3612 - RNA, 21 nt, synthetic construct
  source 1..21: mol_type = other RNA
ctcatgatggcagtggccgtg

SEQ ID NO: 3613 - RNA, 21 nt, synthetic construct
  source 1..21: mol_type = other RNA
cacggccactgccatcatgag

SEQ ID NO: 3614 - RNA, 21 nt, synthetic construct
  source 1..21: mol_type = other RNA
tcatgatggcagtggccgtgt

SEQ ID NO: 3615 - RNA, 21 nt, synthetic construct
  source 1..21: mol_type = other RNA
acacggccactgccatcatga

SEQ ID NO: 3616 - RNA, 21 nt, synthetic construct
  source 1..21: mol_type = other RNA
catgatggcagtggccgtgtt

SEQ ID NO: 3617 - RNA, 21 nt, synthetic construct
  source 1..21: mol_type = other RNA
aacacggccactgccatcatg

SEQ ID NO: 3618 - RNA, 21 nt, synthetic construct
  source 1..21: mol_type = other RNA
atgatggcagtggccgtgttc

SEQ ID NO: 3619 - RNA, 21 nt, synthetic construct
  source 1..21: mol_type = other RNA
gaacacggccactgccatcat

SEQ ID NO: 3620 - RNA, 21 nt, synthetic construct
  source 1..21: mol_type = other RNA
tgatggcagtggccgtgttcc

SEQ ID NO: 3621 - RNA, 21 nt, synthetic construct
  source 1..21: mol_type = other RNA
ggaacacggccactgccatca

SEQ ID NO: 3622 - RNA, 21 nt, synthetic construct
  source 1..21: mol_type = other RNA
gatggcagtggccgtgttcct

SEQ ID NO: 3623 - RNA, 21 nt, synthetic construct
  source 1..21: mol_type = other RNA
aggaacacggccactgccatc

SEQ ID NO: 3624 - RNA, 21 nt, synthetic construct
  source 1..21: mol_type = other RNA
atggcagtggccgtgttcctc

SEQ ID NO: 3625 - RNA, 21 nt, synthetic construct
  source 1..21: mol_type = other RNA
gaggaacacggccactgccat

SEQ ID NO: 3626 - RNA, 21 nt, synthetic construct
  source 1..21: mol_type = other RNA
tggcagtggccgtgttcctct

SEQ ID NO: 3627 - RNA, 21 nt, synthetic construct
  source 1..21: mol_type = other RNA
agaggaacacggccactgcca

SEQ ID NO: 3628 - RNA, 21 nt, synthetic construct
  source 1..21: mol_type = other RNA
cgtgttcctctggggcttcta

SEQ ID NO: 3629 - RNA, 21 nt, synthetic construct
  source 1..21: mol_type = other RNA
tagaagccccagaggaacacg

SEQ ID NO: 3630 - RNA, 21 nt, synthetic construct
  source 1..21: mol_type = other RNA
gtgttcctctggggcttctat

SEQ ID NO: 3631 - RNA, 21 nt, synthetic construct
  source 1..21: mol_type = other RNA
atagaagccccagaggaacac

SEQ ID NO: 3632 - RNA, 21 nt, synthetic construct
  source 1..21: mol_type = other RNA
tgttcctctggggcttctatg

SEQ ID NO: 3633 - RNA, 21 nt, synthetic construct
  source 1..21: mol_type = other RNA
catagaagccccagaggaaca

SEQ ID NO: 3634 - RNA, 21 nt, synthetic construct
  source 1..21: mol_type = other RNA
gttcctctggggcttctatgc

SEQ ID NO: 3635 - RNA, 21 nt, synthetic construct
  source 1..21: mol_type = other RNA
gcatagaagccccagaggaac

SEQ ID NO: 3636 - RNA, 21 nt, synthetic construct
  source 1..21: mol_type = other RNA
ttcctctggggcttctatgcc

SEQ ID NO: 3637 - RNA, 21 nt, synthetic construct
  source 1..21: mol_type = other RNA
ggcatagaagccccagaggaa

SEQ ID NO: 3638 - RNA, 21 nt, synthetic construct
  source 1..21: mol_type = other RNA
tcctctggggcttctatgcct

SEQ ID NO: 3639 - RNA, 21 nt, synthetic construct
  source 1..21: mol_type = other RNA
aggcatagaagccccagagga

SEQ ID NO: 3640 - RNA, 21 nt, synthetic construct
  source 1..21: mol_type = other RNA
cctctggggcttctatgccta

SEQ ID NO: 3641 - RNA, 21 nt, synthetic construct
  source 1..21: mol_type = other RNA
taggcatagaagccccagagg

SEQ ID NO: 3642 - RNA, 21 nt, synthetic construct
  source 1..21: mol_type = other RNA
ctctggggcttctatgcctaa

SEQ ID NO: 3643 - RNA, 21 nt, synthetic construct
  source 1..21: mol_type = other RNA
ttaggcatagaagccccagag

SEQ ID NO: 3644 - RNA, 21 nt, synthetic construct
  source 1..21: mol_type = other RNA
tctggggcttctatgcctaag

SEQ ID NO: 3645 - RNA, 21 nt, synthetic construct
  source 1..21: mol_type = other RNA
cttaggcatagaagccccaga

SEQ ID NO: 3646 - RNA, 21 nt, synthetic construct
  source 1..21: mol_type = other RNA
ctggggcttctatgcctaaga

SEQ ID NO: 3647 - RNA, 21 nt, synthetic construct
  source 1..21: mol_type = other RNA
tcttaggcatagaagccccag

SEQ ID NO: 3648 - RNA, 21 nt, synthetic construct
  source 1..21: mol_type = other RNA
tggggcttctatgcctaagac

SEQ ID NO: 3649 - RNA, 21 nt, synthetic construct
  source 1..21: mol_type = other RNA
gtcttaggcatagaagcccca

SEQ ID NO: 3650 - RNA, 21 nt, synthetic construct
  source 1..21: mol_type = other RNA
aactgcgttggacaccataag

SEQ ID NO: 3651 - RNA, 21 nt, synthetic construct
  source 1..21: mol_type = other RNA
cttatggtgtccaacgcagtt

SEQ ID NO: 3652 - RNA, 21 nt, synthetic construct
  source 1..21: mol_type = other RNA
actgcgttggacaccataagc

SEQ ID NO: 3653 - RNA, 21 nt, synthetic construct
  source 1..21: mol_type = other RNA
gcttatggtgtccaacgcagt

SEQ ID NO: 3654 - RNA, 21 nt, synthetic construct
  source 1..21: mol_type = other RNA
ctgcgttggacaccataagcc

SEQ ID NO: 3655 - RNA, 21 nt, synthetic construct
  source 1..21: mol_type = other RNA
ggcttatggtgtccaacgcag

SEQ ID NO: 3656 - RNA, 21 nt, synthetic construct
  source 1..21: mol_type = other RNA
tgcgttggacaccataagcca

SEQ ID NO: 3657 - RNA, 21 nt, synthetic construct
  source 1..21: mol_type = other RNA
tggcttatggtgtccaacgca

SEQ ID NO: 3658 - RNA, 21 nt, synthetic construct
  source 1..21: mol_type = other RNA
gcgttggacaccataagccac

SEQ ID NO: 3659 - RNA, 21 nt, synthetic construct
  source 1..21: mol_type = other RNA
gtggcttatggtgtccaacgc

SEQ ID NO: 3660 - RNA, 21 nt, synthetic construct
  source 1..21: mol_type = other RNA
cgttggacaccataagccaca

SEQ ID NO: 3661 - RNA, 21 nt, synthetic construct
  source 1..21: mol_type = other RNA
tgtggcttatggtgtccaacg

SEQ ID NO: 3662 - RNA, 21 nt, synthetic construct
  source 1..21: mol_type = other RNA
gttggacaccataagccacag

SEQ ID NO: 3663 - RNA, 21 nt, synthetic construct
  source 1..21: mol_type = other RNA
ctgtggcttatggtgtccaac

SEQ ID NO: 3664 - RNA, 21 nt, synthetic construct
  source 1..21: mol_type = other RNA
ttggacaccataagccacagc

SEQ ID NO: 3665 - RNA, 21 nt, synthetic construct
  source 1..21: mol_type = other RNA
gctgtggcttatggtgtccaa

SEQ ID NO: 3666 - RNA, 21 nt, synthetic construct
  source 1..21: mol_type = other RNA
tggacaccataagccacagcc

SEQ ID NO: 3667 - RNA, 21 nt, synthetic construct
  source 1..21: mol_type = other RNA
ggctgtggcttatggtgtcca

SEQ ID NO: 3668 - RNA, 21 nt, synthetic construct
  source 1..21: mol_type = other RNA
ggacaccataagccacagcct

SEQ ID NO: 3669 - RNA, 21 nt, synthetic construct
  source 1..21: mol_type = other RNA
aggctgtggcttatggtgtcc

SEQ ID NO: 3670 - RNA, 21 nt, synthetic construct
  source 1..21: mol_type = other RNA
gacaccataagccacagcctc

SEQ ID NO: 3671 - RNA, 21 nt, synthetic construct
  source 1..21: mol_type = other RNA
gaggctgtggcttatggtgtc

SEQ ID NO: 3672 - RNA, 21 nt, synthetic construct
  source 1..21: mol_type = other RNA
acaccataagccacagcctca

SEQ ID NO: 3673 - RNA, 21 nt, synthetic construct
  source 1..21: mol_type = other RNA
tgaggctgtggcttatggtgt

SEQ ID NO: 3674 - RNA, 21 nt, synthetic construct
  source 1..21: mol_type = other RNA
caccataagccacagcctcac

SEQ ID NO: 3675 - RNA, 21 nt, synthetic construct
  source 1..21: mol_type = other RNA
gtgaggctgtggcttatggtg

SEQ ID NO: 3676 - RNA, 21 nt, synthetic construct
  source 1..21: mol_type = other RNA
accataagccacagcctcaca

SEQ ID NO: 3677 - RNA, 21 nt, synthetic construct
  source 1..21: mol_type = other RNA
tgtgaggctgtggcttatggt

SEQ ID NO: 3678 - RNA, 21 nt, synthetic construct
  source 1..21: mol_type = other RNA
ccataagccacagcctcacag

SEQ ID NO: 3679 - RNA, 21 nt, synthetic construct
  source 1..21: mol_type = other RNA
ctgtgaggctgtggcttatgg

SEQ ID NO: 3680 - RNA, 21 nt, synthetic construct
  source 1..21: mol_type = other RNA
cataagccacagcctcacagg

SEQ ID NO: 3681 - RNA, 21 nt, synthetic construct
  source 1..21: mol_type = other RNA
cctgtgaggctgtggcttatg

SEQ ID NO: 3682 - RNA, 21 nt, synthetic construct
  source 1..21: mol_type = other RNA
ataagccacagcctcacagga

SEQ ID NO: 3683 - RNA, 21 nt, synthetic construct
  source 1..21: mol_type = other RNA
tcctgtgaggctgtggcttat

SEQ ID NO: 3684 - RNA, 21 nt, synthetic construct
  source 1..21: mol_type = other RNA
taagccacagcctcacaggaa

SEQ ID NO: 3685 - RNA, 21 nt, synthetic construct
  source 1..21: mol_type = other RNA
ttcctgtgaggctgtggctta

SEQ ID NO: 3686 - RNA, 21 nt, synthetic construct
  source 1..21: mol_type = other RNA
gccacagcctcacaggaagtg

SEQ ID NO: 3687 - RNA, 21 nt, synthetic construct
  source 1..21: mol_type = other RNA
cacttcctgtgaggctgtggc

SEQ ID NO: 3688 - RNA, 21 nt, synthetic construct
  source 1..21: mol_type = other RNA
cacagcctcacaggaagtggg

SEQ ID NO: 3689 - RNA, 21 nt, synthetic construct
  source 1..21: mol_type = other RNA
cccacttcctgtgaggctgtg

SEQ ID NO: 3690 - RNA, 21 nt, synthetic construct
  source 1..21: mol_type = other RNA
acagcctcacaggaagtgggg

SEQ ID NO: 3691 - RNA, 21 nt, synthetic construct
  source 1..21: mol_type = other RNA
ccccacttcctgtgaggctgt

SEQ ID NO: 3692 - RNA, 21 nt, synthetic construct
  source 1..21: mol_type = other RNA
aaaaggggaaggggcagtggg

SEQ ID NO: 3693 - RNA, 21 nt, synthetic construct
  source 1..21: mol_type = other RNA
cccactgccccttcccctttt

SEQ ID NO: 3694 - RNA, 21 nt, synthetic construct
  source 1..21: mol_type = other RNA
ggcccactgcatctgattggc

SEQ ID NO: 3695 - RNA, 21 nt, synthetic construct
  source 1..21: mol_type = other RNA
gccaatcagatgcagtgggcc

SEQ ID NO: 3696 - RNA, 21 nt, synthetic construct
  source 1..21: mol_type = other RNA
gcccactgcatctgattggca

SEQ ID NO: 3697 - RNA, 21 nt, synthetic construct
  source 1..21: mol_type = other RNA
tgccaatcagatgcagtgggc

SEQ ID NO: 3698 - RNA, 21 nt, synthetic construct
  source 1..21: mol_type = other RNA
tgcatctgattggcagtcact

SEQ ID NO: 3699 - RNA, 21 nt, synthetic construct
  source 1..21: mol_type = other RNA
agtgactgccaatcagatgca

SEQ ID NO: 3700 - RNA, 21 nt, synthetic construct
  source 1..21: mol_type = other RNA
gcatctgattggcagtcactt

SEQ ID NO: 3701 - RNA, 21 nt, synthetic construct
  source 1..21: mol_type = other RNA
aagtgactgccaatcagatgc

SEQ ID NO: 3702 - RNA, 21 nt, synthetic construct
  source 1..21: mol_type = other RNA
catctgattggcagtcacttc

SEQ ID NO: 3703 - RNA, 21 nt, synthetic construct
  source 1..21: mol_type = other RNA
gaagtgactgccaatcagatg

SEQ ID NO: 3704 - RNA, 21 nt, synthetic construct
  source 1..21: mol_type = other RNA
atctgattggcagtcacttcc

SEQ ID NO: 3705 - RNA, 21 nt, synthetic construct
  source 1..21: mol_type = other RNA
ggaagtgactgccaatcagat

SEQ ID NO: 3706 - RNA, 21 nt, synthetic construct
  source 1..21: mol_type = other RNA
tctgattggcagtcacttccc

SEQ ID NO: 3707 - RNA, 21 nt, synthetic construct
  source 1..21: mol_type = other RNA
gggaagtgactgccaatcaga

SEQ ID NO: 3708 - RNA, 21 nt, synthetic construct
  source 1..21: mol_type = other RNA
ctgattggcagtcacttccca

SEQ ID NO: 3709 - RNA, 21 nt, synthetic construct
  source 1..21: mol_type = other RNA
tgggaagtgactgccaatcag

SEQ ID NO: 3710 - RNA, 21 nt, synthetic construct
  source 1..21: mol_type = other RNA
tgattggcagtcacttcccat

SEQ ID NO: 3711 - RNA, 21 nt, synthetic construct
  source 1..21: mol_type = other RNA
atgggaagtgactgccaatca

SEQ ID NO: 3712 - RNA, 21 nt, synthetic construct
  source 1..21: mol_type = other RNA
gattggcagtcacttcccatg

SEQ ID NO: 3713 - RNA, 21 nt, synthetic construct
  source 1..21: mol_type = other RNA
catgggaagtgactgccaatc

SEQ ID NO: 3714 - RNA, 21 nt, synthetic construct
  source 1..21: mol_type = other RNA
attggcagtcacttcccatga

SEQ ID NO: 3715 - RNA, 21 nt, synthetic construct
  source 1..21: mol_type = other RNA
tcatgggaagtgactgccaat

SEQ ID NO: 3716 - RNA, 21 nt, synthetic construct
  source 1..21: mol_type = other RNA
ttggcagtcacttcccatgag

SEQ ID NO: 3717 - RNA, 21 nt, synthetic construct
  source 1..21: mol_type = other RNA
ctcatgggaagtgactgccaa

SEQ ID NO: 3718 - RNA, 21 nt, synthetic construct
  source 1..21: mol_type = other RNA
tggcagtcacttcccatgagg

SEQ ID NO: 3719 - RNA, 21 nt, synthetic construct
  source 1..21: mol_type = other RNA
cctcatgggaagtgactgcca

SEQ ID NO: 3720 - RNA, 21 nt, synthetic construct
  source 1..21: mol_type = other RNA
ggcagtcacttcccatgaggg

SEQ ID NO: 3721 - RNA, 21 nt, synthetic construct
  source 1..21: mol_type = other RNA
ccctcatgggaagtgactgcc

SEQ ID NO: 3722 - RNA, 21 nt, synthetic construct
  source 1..21: mol_type = other RNA
gcagtcacttcccatgagggc

SEQ ID NO: 3723 - RNA, 21 nt, synthetic construct
  source 1..21: mol_type = other RNA
gccctcatgggaagtgactgc

SEQ ID NO: 3724 - RNA, 21 nt, synthetic construct
  source 1..21: mol_type = other RNA
cagtcacttcccatgagggcc

SEQ ID NO: 3725 - RNA, 21 nt, synthetic construct
  source 1..21: mol_type = other RNA
ggccctcatgggaagtgactg

SEQ ID NO: 3726 - RNA, 21 nt, synthetic construct
  source 1..21: mol_type = other RNA
agtcacttcccatgagggcct

SEQ ID NO: 3727 - RNA, 21 nt, synthetic construct
  source 1..21: mol_type = other RNA
aggccctcatgggaagtgact

SEQ ID NO: 3728 - RNA, 21 nt, synthetic construct
  source 1..21: mol_type = other RNA
gtcacttcccatgagggcctg

SEQ ID NO: 3729 - RNA, 21 nt, synthetic construct
  source 1..21: mol_type = other RNA
caggccctcatgggaagtgac

SEQ ID NO: 3730 - RNA, 21 nt, synthetic construct
  source 1..21: mol_type = other RNA
tcacttcccatgagggcctgg

SEQ ID NO: 3731 - RNA, 21 nt, synthetic construct
  source 1..21: mol_type = other RNA
ccaggccctcatgggaagtga

SEQ ID NO: 3732 - RNA, 21 nt, synthetic construct
  source 1..21: mol_type = other RNA
cacccgctgcagttgccctaa

SEQ ID NO: 3733 - RNA, 21 nt, synthetic construct
  source 1..21: mol_type = other RNA
ttagggcaactgcagcgggtg

SEQ ID NO: 3734 - RNA, 21 nt, synthetic construct
  source 1..21: mol_type = other RNA
acccgctgcagttgccctaag

SEQ ID NO: 3735 - RNA, 21 nt, synthetic construct
  source 1..21: mol_type = other RNA
cttagggcaactgcagcgggt

SEQ ID NO: 3736 - RNA, 21 nt, synthetic construct
  source 1..21: mol_type = other RNA
ccgctgcagttgccctaagga

SEQ ID NO: 3737 - RNA, 21 nt, synthetic construct
  source 1..21: mol_type = other RNA
tccttagggcaactgcagcgg

SEQ ID NO: 3738 - protein, 10 aa, synthetic construct
EPKSRFAMLD

SEQ ID NO: 3739 - protein, 460 aa, Homo sapiens
MFTIKLLLFIVPLVISSRIDQDNSSFDSLSPEPKSRFAMLDDVKILANGLLQLGHGLKDFVHKTKGQINDIFQKLNIFDQSFYDLSLQTSEIKEEEKELRRTTYKLQVKNEEVKNMSLELNSKLESLLEEKILLQQKVKYLEEQLTNLIQNQPETPEHPEVTSLKTFVEKQDNSIKDLLQTVEDQYKQLNQQHSQIKEIENQLRRTSIQEPTEISLSSKPRAPRTTPFLQLNEIRNVKHDGIPAECTTIYNRGEHTSGMYAIRPSNSQVFHVYCDVISGSPWTLIQHRIDGSQNFNETWENYKYGFGRLDGEFWLGLEKIYSIVKQSNYVLRIELEDWKDNKHYIEYSFYLGNHETNYTLHLVAITGNVPNAIPENKDLVFSTWDHKAKGHFNCPEGYSGGWWWHDECGENNLNGKYNKPRAKSKPERRRGLSWKSQNGRLYSIKSTKMLIHPTDSESFE

SEQ ID NO: 3740 - protein, 123 aa, synthetic construct
QVQLVESGGGVVQPGRSLRLSCAASGFTFSSYGMHWVRQAPGKGLEWVAVISYDGSNKYYADSVKGRFTISRDNSKNTLYLQMNSLRAEDTAVYYCAKVGATTFYYYYGMDVWGQGTTVTVSS

SEQ ID NO: 3741 - protein, 123 aa, synthetic construct
QVQLVESGGGVVQPGRSLRLSCAASGFTFSSYGMHWVRQAPGKGLEWVAVISNDGSNKYYVDSVKGRFTMGRDNSKNTLYLQMNSLRVEDTAVYYCAKGAGTLYYYYYGMDVWGQGTTVTVSS

SEQ ID NO: 3742 - protein, 124 aa, synthetic construct
QVQLVQSGGGVVQPGRSLRLSCAASGFTFSTYGMHWVRQAPGKGLEWMAVISFDRGNKYYADSVKGRFTISRDNSKNTLYLQMNSLRAEDTAVYYCAKGGGSGTFYYYYGMDVWGQGTTVTVSS

SEQ ID NO: 3743 - protein, 125 aa, synthetic construct
QVQLQQSGPGLVKPSQTLSLTCAISGDSVSSNSPAWNWIRQSPSRGLEWLGRTYYRSKWYNDYAVSVRGRITINPDTSNNQFSLHLNSVTPEDTAMYYCARDKGLTARPTYFDYWGQGTLVTVSS

SEQ ID NO: 3744 - protein, 126 aa, synthetic construct
EVQLVESGGGVIQPGGSLRLSCAASGFTFDDYAMNWVRQGPGKGLEWVSAISGDGGSTYYADSVKGRFTISRDNSKNSLYLQMNSLRAEDTAFFYCAKDLRNTIFGVVIPDAFDIWGQGTMVTVSS

SEQ ID NO: 3745 - protein, 118 aa, synthetic construct
QVQLVESGGGLVKPGGSLRLSCAASGFTFSDYYMSWIRQAPGKGLEWVSYIGSSGVNMYYADSVKGRFTISRDNAKNSLYLEMNSLRAEDTAVYYCARDSSQLGFDYWGQGTLVTVSS

SEQ ID NO: 3746 - protein, 120 aa, synthetic construct
EVQLVQSGGGVVQPGRSLRLSCAASGFTFSNYGMHWVRQAPGKGLEWVAVVWYDGDNKYYADSVKGRFTISRDNSKNTLYLQMNSLRAEDTAVYYCARDIITSRPTLDYWGQGTLVTVSS

SEQ ID NO: 3747 - protein, 118 aa, synthetic construct
QVQLVESGGGLVKPGGSLRLSCAASGFTFSDYYMSWIRQAPGKGLEWVSYISSSGSTIYYADSVKGRFTISRDNAKNSLYLQMNSLRAEDTAVYYCARDSSQLGFDYWGQGTLVTVSS

SEQ ID NO: 3748 - protein, 114 aa, synthetic construct
QVQLVQSGPEVKKPGASVRVSCKASGYLSDFIITWVRQAPGQGLEWMGWISTYSGDTDSAPKFQGRVTMTTDTSTTTVFLELRSLRSDDTAVYYCARGRLFDYWGQGTLVTVSS

SEQ ID NO: 3749 - protein, 118 aa, synthetic construct
QVQLVESGGVSVKPGGSLRLSCAASGFTFSDYYMSWIRQAPGKGLEWVSYIGSSGTNDYYADSVKGRFTISRDNAKNSLYLQMDSLRAEDTAVYYCARDSSQMGFDYWGQGTLVTVSS

SEQ ID NO: 3750 - protein, 406 aa, synthetic construct
MSGAPTAGAALMLCAATAVLLSAQGGPVQSKSPRFASWDEMNVLAHGLLQLGQGLREHAERTRSQLSALERRLSACGSACQGTEGSTDLPLAPESRVDPEVLHSLQTQLKAQNSRIQQLFHKVAQQQRHLEKQHLRIQHLQSQFGLLDHKHLDHEVAKPARRKRLPEMAQPVDPAHNVSRLHRLPRDCQELFQVGERQSGLFEIQPQGSPPFLVNCKMTSDGGWTVIQRRHDGSVDFNRPWEAYKAGFGDPHGEFWLGLEKVHSITGDRNSRLAVQLRDWDGNAELLQFSVHLGGEDTAYSLQLTAPVAGQLGATTVPPSGLSVPFSTWDQDHDLRRDKNCAKSLSGGWWFGTCSHSNLNGQYFRSIPQQRQKLKKGIFWKTWRGRYYPLQATTMLIQPMAAEAAS

SEQ ID NO: 3751 - protein, 107 aa, synthetic construct
DIQMTQSPSSVSAFVGDRVTITCRASQGISSWLAWYQQKPGKAPKLLIYAASSLQSGVPSRFSGSGSGTDFTLTISSLQPEDFATYYCQKANSFPFTFGPGTKVEIK

SEQ ID NO: 3752 - protein, 107 aa, synthetic construct
DIQMTQSPSTLSASVGNRVTITCRASQSISSWLAWYQQKPGKAPKFLIYKASSLESGVPSRFSGSGSGTEFTLTITSLQPDDFATYYCQQYNIYSWTFGQGTKVEIK

SEQ ID NO: 3753 - protein, 108 aa, synthetic construct
DIQMTQSPSSVSASVGNRVTITCRASQGISSWLAWYHQKPGKVPKVLIYAASSLQSGVPSRFSGSGSGTDFTLTISSLQPEDFATYYCQQANSFPFTFGPGTKVEIKR

SEQ ID NO: 3754 - protein, 108 aa, synthetic construct
DIQMTQSPSTLSASVGDRVTITCRASQSINYWLAWYQQKPGKAPKPLIYKASSLESGVPSRFSGSGSGTEFTLTISSLQPDDFTTYYCQQYNSYSPTFGQGTKLEIKR

SEQ ID NO: 3755 - protein, 108 aa, synthetic construct
DIQMTQSPSTLSASVGDRVTITCRASQSIRSWLAWYQQKPGKAPKLLIYKASSLESGVPSRFSGSGSGTEFTLTISSLQPDDFATYYCQQYNSYSYTFGQGTKLEIKR

SEQ ID NO: 3756 - protein, 108 aa, synthetic construct
DIQMTQSPSSLSASVGDRVTITCRTSQNIINFLNWYQQKPGKAPKLLIYTTSTLQSGVPSRFSGSGSGTDFTLSINSLQPEDFATYFCQQTYSNPLTFGGGTKLEIKR

SEQ ID NO: 3757 - protein, 108 aa, synthetic construct
DIQLTQSPSFLSASVGDRVTITCWASQGINSYLAWYQQKPGKAPKLLIYPASTLQSGVPSRFSGSGSGTEFTLTISSLQPVDFATYYCQQLNSYPLTFGGGTKVEIKR

SEQ ID NO: 3758 - protein, 108 aa, synthetic construct
DIQMTQSPSSLSASVGDRVTITCRASQSIISFLNWYQQKPGKAPKLLIYTASSLQSGVPSRFSGSGSGTDFTLTISSLQPEDFATYYCQQTYSNPLTFGGGTKVEIKR

SEQ ID NO: 3759 - protein, 113 aa, synthetic construct
DVVMTQSPLSLPVTLGQPASISCRSSQSLVYSDGNTYLNWFQQRPGQSPRRLIYKVSNRDSGVPDRFSGSGSGTDFTLKISRVEAEDVGVYYCMQGTHWPYTFGQGTKLEIKR

SEQ ID NO: 3760 - protein, 108 aa, synthetic construct
DIQMTQSPSSLSASVGDRVTITCRASQNIINFLNWYQQRPGKAPQLLIYVAASLQSGVPSRFTGSGYGTDFTLTISSLQPEDFATYYCQQTYTNPLTFGGGTKVEIKR

SEQ ID NO: 3761 - protein, 5 aa, synthetic construct
GGGGS

SEQ ID NO: 3762 - protein, 16 aa, synthetic construct
AKVGATTFYYYYGMDV

SEQ ID NO: 3763 - protein, 16 aa, synthetic construct
AKGAGTLYYYYYGMDV

SEQ ID NO: 3764 - protein, 17 aa, synthetic construct
AKGGGSGTFYYYYGMDV

SEQ ID NO: 3765 - protein, 15 aa, synthetic construct
ARDKGLTARPTYFDY

SEQ ID NO: 3766 - protein, 19 aa, synthetic construct
AKDLRNTIFGVVIPDAFDI

SEQ ID NO: 3767 - protein, 11 aa, synthetic construct
ARDSSQLGFDY

SEQ ID NO: 3768 - protein, 13 aa, synthetic construct
ARDIITSRPTLDY

SEQ ID NO: 3769 - protein, 11 aa, synthetic construct
ARDSSQLGFDY

SEQ ID NO: 3770 - protein, 8 aa, synthetic construct
ARGRLFDY

SEQ ID NO: 3771 - protein, 11 aa, synthetic construct
ARDSSQMGFDY

SEQ ID NO: 3772 - protein, 26 aa, synthetic construct
EPKSRFAMLDDVKILANGLLQLGHGL

SEQ ID NO: 3773 - protein, 9 aa, synthetic construct
QKANSFPFT

SEQ ID NO: 3774 - protein, 9 aa, synthetic construct
QQYNIYSWT

SEQ ID NO: 3775 - protein, 9 aa, synthetic construct
QQANSFPFT

SEQ ID NO: 3776 - protein, 9 aa, synthetic construct
QQYNSYSPT

SEQ ID NO: 3777 - protein, 9 aa, synthetic construct
QQYNSYSYT

SEQ ID NO: 3778 - protein, 9 aa, synthetic construct
QQTYSNPLT

SEQ ID NO: 3779 - protein, 9 aa, synthetic construct
QQLNSYPLT

SEQ ID NO: 3780 - protein, 9 aa, synthetic construct
QQTYSNPLT

SEQ ID NO: 3781 - protein, 9 aa, synthetic construct
MQGTHWPYT

SEQ ID NO: 3782 - protein, 9 aa, synthetic construct
QQTYTNPLT

SEQ ID NO: 3783 - protein, 356 aa, synthetic construct
GPVQSKSPRFASWDEMNVLAHGLLQLGQGLREHAERTRSQLSALERRLSACGSACQGTEGSTDLPLAPESRVDPEVLHSLQTQLKAQNSRIQQLFHKVAQQQRHLEKQHLRIQHLQSQFGLLDEPRGPTIKPCPPCKCPAPNLLGGPSVFIFPPKIKDVLMISLSPIVTCVVVDVSEDDPDVQISWFVNNVEVHTAQTQTHREDYNSTLRVVSALPIQHQDWMSGKEFKCKVNNKDLPAPIERTISKPKGSVRAPQVYVLPPPEEEMTKKQVTLTCMVTDFMPEDIYVEWTNNGKTELNYKNTEPVLDSDGSYFMYSKLRVEKKNWVERNSYSCSVVHEGLHNHHTTKSFSRTPGK

SEQ ID NO: 3784 - protein, 8 aa, synthetic construct
GFTFSSYG

SEQ ID NO: 3785 - protein, 8 aa, synthetic construct
GFTFSSYG

SEQ ID NO: 3786 - protein, 8 aa, synthetic construct
GFTFSTYG

SEQ ID NO: 3787 - protein, 10 aa, synthetic construct
GDSVSSNSPA

SEQ ID NO: 3788 - protein, 8 aa, synthetic construct
GFTFDDYA

SEQ ID NO: 3789 - protein, 8 aa, synthetic construct
GFTFSDYY

SEQ ID NO: 3790 - protein, 8 aa, synthetic construct
GFTFSNYG

SEQ ID NO: 3791 - protein, 8 aa, synthetic construct
GFTFSDYY

SEQ ID NO: 3792 - protein, 7 aa, synthetic construct
GYLSDFI

SEQ ID NO: 3793 - protein, 8 aa, synthetic construct
GFTFSDYY

SEQ ID NO: 3794 - protein, 235 aa, synthetic construct
GAPSRVDPDLSSFDSAPSEPKSRFAMLDDVKILANGLLQLGHGLKDFVHKTKGQINDIFQKLNIFDQSFYDLSLRTNEIKEEEKELRRTTSTLQVKNEEVKNMSVELNSKLESLLEEKTALQHKVRALEEQLTNLILSPAGAQEHPEVTSLKSFVEQQDNSIRELLQSVEEQYKQLSQQHMQIKEIEKQLRKTGIQEPSENSLSSKSRAPRTTPPLQLNETENTEQDASHHHHHH

SEQ ID NO: 3795 - protein, 8 aa, synthetic construct
ISYDGSNK

SEQ ID NO: 3796 - protein, 8 aa, synthetic construct
ISNDGSNK

SEQ ID NO: 3797 - protein, 8 aa, synthetic construct
ISFDRGNK

SEQ ID NO: 3798 - protein, 9 aa, synthetic construct
TYYRSKWYN

SEQ ID NO: 3799 - protein, 8 aa, synthetic construct
ISGDGGST

SEQ ID NO: 3800 - protein, 8 aa, synthetic construct
IGSSGVNM

SEQ ID NO: 3801 - protein, 8 aa, synthetic construct
VWYDGDNK

SEQ ID NO: 3802 - protein, 8 aa, synthetic construct
ISSSGSTI

SEQ ID NO: 3803 - protein, 8 aa, synthetic construct
ISTYSGDT

SEQ ID NO: 3804 - protein, 8 aa, synthetic construct
IGSSGTND

SEQ ID NO: 3805 - protein, 33 aa, synthetic construct
RFASWDEMNVLAHGLLQLGQGLREHAERTRSQL

SEQ ID NO: 3806 - protein, 6 aa, synthetic construct
QGISSW

SEQ ID NO: 3807 - protein, 6 aa, synthetic construct
QSISSW

SEQ ID NO: 3808 - protein, 6 aa, synthetic construct
QGISSW

SEQ ID NO: 3809 - protein, 6 aa, synthetic construct
QSINYW

SEQ ID NO: 3810 - protein, 6 aa, synthetic construct
QSIRSW

SEQ ID NO: 3811 - protein, 6 aa, synthetic construct
QNIINF

SEQ ID NO: 3812 - protein, 6 aa, synthetic construct
QGINSY

SEQ ID NO: 3813 - protein, 6 aa, synthetic construct
QSIISF

SEQ ID NO: 3814 - protein, 11 aa, synthetic construct
QSLVYSDGNTY

SEQ ID NO: 3815 - protein, 6 aa, synthetic construct
QNIINF

SEQ ID NO: 3816 - protein, 6 aa, synthetic construct
GGGGSK

SEQ ID NO: 3817-3826 - skipped (10 entries)

SEQ ID NO: 3827 - protein, 252 aa, synthetic construct
SRVDPDLSPFDSVPSEPKSRFAMLDDVKILANGLLQLGHGLKDFVHKTKGQINDIFQKLNIFDQCFYDLSLQTNEIKEEEKELRRTTSKLQVKNEEVKNMSLELNSKLESLLEEKMALQHRVRALEEQLTSLVQNPPGAREHPEVTSLKSFVEQQDNSIRELLQSVEEQYKQLSQQHIQIKEIENQLRKTGIQEPTENSLYSKPRAPRTTPPLHLKEAKNIEQDEQKLISEEDLGGEQKLISEEDLHHHHHH

SEQ ID NO: 3828 - DNA, 1383 bp, Homo sapiens
  source 1..1383: mol_type = genomic DNA
atgttcacaattaagctccttctttttattgttcctctagttatttcctccagaattgatcaagacaattcatcatttgattctctatctccagagccaaaatcaagatttgctatgttagacgatgtaaaaattttagccaatggcctccttcagttgggacatggtcttaaagactttgtccataagacgaagggccaaattaatgacatatttcaaaaactcaacatatttgatcagtctttttatgatctatcgctgcaaaccagtgaaatcaaagaagaagaaaaggaactgagaagaactacatataaactacaagtcaaaaatgaagaggtaaagaatatgtcacttgaactcaactcaaaacttgaaagcctcctagaagaaaaaattctacttcaacaaaaagtgaaatatttagaagagcaactaactaacttaattcaaaatcaacctgaaactccagaacacccagaagtaacttcacttaaaacttttgtagaaaaacaagataatagcatcaaagaccttctccagaccgtggaagaccaatataaacaattaaaccaacagcatagtcaaataaaagaaatagaaaatcagctcagaaggactagtattcaagaacccacagaaatttctctatcttccaagccaagagcaccaagaactactccctttcttcagttgaatgaaataagaaatgtaaaacatgatggcattcctgctgaatgtaccaccatttataacagaggtgaacatacaagtggcatgtatgccatcagacccagcaactctcaagtttttcatgtctactgtgatgttatatcaggtagtccatggacattaattcaacatcgaatagatggatcacaaaacttcaatgaaacgtgggagaactacaaatatggttttgggaggcttgatggagaattttggttgggcctagagaagatatactccatagtgaagcaatctaattatgttttacgaattgagttggaagactggaaagacaacaaacattatattgaatattctttttacttgggaaatcacgaaaccaactatacgctacatctagttgcgattactggcaatgtccccaatgcaatcccggaaaacaaagatttggtgttttctacttgggatcacaaagcaaaaggacacttcaactgtccagagggttattcaggaggctggtggtggcatgatgagtgtggagaaaacaacctaaatggtaaatataacaaaccaagagcaaaatctaagccagagaggagaagaggattatcttggaagtctcaaaatggaaggttatactctataaaatcaaccaaaatgttgatccatccaacagattcagaaagctttgaatga

SEQ ID NO: 3829 - DNA, 369 bp, synthetic construct
  source 1..369: mol_type = other DNA
caggtgcagctggtggagtctgggggaggcgtggtccagcctgggaggtccctgagactctcctgtgcagcctctggattcaccttcagtagttatggcatgcactgggtccgccaggctccaggcaaggggctggagtgggtggcagttatatcatatgatggaagtaataaatactatgcagactccgtgaagggccgattcaccatttccagagacaattccaagaacacgctgtatctgcaaatgaacagcctgagagctgaggacacggctgtgtattactgtgcgaaagtgggagctactactttctactactactacggtatggacgtctggggccaagggaccacggtcaccgtctcctca

SEQ ID NO: 3830 - DNA, 369 bp, synthetic construct
  source 1..369: mol_type = other DNA
caggtgcagctggtggagtctgggggaggcgtggtccagcctgggaggtccctgagactctcctgtgcagcctctggattcaccttcagtagctatggcatgcactgggtccgccaggctccaggcaaggggctggagtgggtggcagttatatcaaatgatggaagtaataaatactatgtagattccgtgaagggccgattcaccatgggcagagacaattccaagaacacgctgtatctccaaatgaacagcctgagagttgaggacacggctgtgtattactgtgcgaaaggggctggaactctttactactactactacggtatggacgtctggggccaagggaccacggtcaccgtctcctca

SEQ ID NO: 3831 - DNA, 372 bp, synthetic construct
  source 1..372: mol_type = other DNA
caggtgcagctggtggagtctgggggaggcgtggtccagcctgggaggtccctgagactctcctgtgcagcctctggattcaccttcagtacctatggcatgcactgggtccgccaggctccaggcaaggggctggagtggatggcagttatatcatttgatagaggtaataaatactatgcagactccgtgaagggccgattcaccatctccagagacaattccaagaacacgctgtatctgcaaatgaacagcctgagagctgaggacacggctgtgtattactgtgcgaaaggggggggttcggggactttctactactactacggtatggacgtctggggccaagggaccacggtcaccgtctcctca

SEQ ID NO: 3832 - DNA, 375 bp, synthetic construct
  source 1..375: mol_type = other DNA
caggtacagctgcagcagtcaggtccaggactggtgaaaccctcgcagaccctctcactcacctgtgccatctccggggacagtgtctctagcaacagtcctgcttggaactggatcaggcagtccccatcgagaggccttgagtggctgggaaggacatactacaggtccaagtggtataatgattatgcagtgtctgtgagaggtcgaataaccatcaacccagacacatccaataaccagttctccctacatctgaactctgtgactcccgaggacacggcgatgtattactgtgcaagagacaagggtctaacagctcgtccgacctactttgactactggggccagggaaccctggtcaccgtctcctca

SEQ ID NO: 3833 - DNA, 378 bp, synthetic construct
  source 1..378: mol_type = other DNA
gaggtgcagctggtggagtctgggggaggcgtgatacagcctggggggtccctgagactctcctgtgcagcctctggattcaccttcgatgattatgccatgaactgggtccgtcaaggtccagggaagggtctggagtgggtctctgccataagtggtgatggcggtagcacatactatgcagactcggtgaagggccgattcaccatctccagagacaacagcaaaaactccctgtatctgcaaatgaacagtctgagagctgaggacaccgcctttttttactgtgcaaaagatctccgtaatacgatttttggagtggttattcccgatgcttttgatatctggggccaagggacaatggtcaccgtctcttca

SEQ ID NO: 3834 - DNA, 354 bp, synthetic construct
  source 1..354: mol_type = other DNA
caggtgcagctggtggagtcggggggaggcttggtcaagcctggagggtccctgagactctcctgtgcagcctctggattcactttcagtgactactacatgagctggatccgtcaggctccagggaaggggctggagtgggtttcatacattggtagtagtggtgtcaacatgtactacgcagactctgtgaagggccgattcaccatctccagggacaacgccaagaattcattatatctggaaatgaacagcctgagagccgaggacacggctgtttattactgtgcgagagactcttcccaactgggttttgactactggggccagggaaccctggtcaccgtctcctca

SEQ ID NO: 3835 - DNA, 360 bp, synthetic construct
  source 1..360: mol_type = other DNA
gaggtgcagctggtgcagtctgggggaggcgtggtccagcctgggaggtccctgagactctcctgtgcagcgtctggattcaccttcagtaattatggcatgcactgggtccgccaggctccaggcaaggggctggagtgggtggcagttgtttggtatgatggagataataaatactatgcagactccgtgaagggccgattcaccatctccagagacaattccaagaacacgctgtatctgcaaatgaacagcctgagagccgaggacacggctgtgtattactgtgcgagagatattatcacatctcgcccgactttggactactggggccagggaaccctggtcactgtctcctca

SEQ ID NO: 3836 - DNA, 354 bp, synthetic construct
  source 1..354: mol_type = other DNA
caggtgcagctggtggagtcggggggaggcttggtcaagcctggagggtccctgagactctcctgtgcagcctctggattcaccttcagtgactactacatgagctggatccgccaggctccagggaaggggctggagtgggtttcatacattagtagtagtggtagtaccatatactacgcagactctgtgaagggccgattcaccatatccagggacaacgccaagaactcactgtatctgcaaatgaacagcctgagagccgaggacacggccgtgtattactgtgcgagagattcttcccaactgggttttgactactggggccagggaaccctggtcaccgtctcctca

SEQ ID NO: 3837 - DNA, 342 bp, synthetic construct
  source 1..342: mol_type = other DNA
caggtgcagctggtacagtctggacctgaggtgaagaagcctggggcctcagtgagggtctcctgtaaggcttctggttaccttagtgactttattatcacctgggtgcgacaggcccctggacaagggcttgagtggatgggatggatcagcacttacagtggtgacacagactctgcaccgaagttccagggcagagtcaccatgaccacagacacatccacgactacagtcttcttggaactgaggagcctgagatctgacgacacggccgtgtattattgtgcgagagggcggctgtttgactactggggccagggaaccctggtcaccgtctcctca

SEQ ID NO: 3838 - DNA, 354 bp, synthetic construct
  source 1..354: mol_type = other DNA
caggtgcagctggtggagtctgggggagtctcggtcaagcctggagggtccctgcgactctcctgtgcagcctctggattcaccttcagtgactactacatgagctggatccgccaggcgccagggaagggactggagtgggtttcgtacattggtagtagtggtactaatgactactacgcagactctgtgaagggccgattcaccatctccagggacaacgccaagaactcactgtatcttcaaatggacagcctgagagccgaggacacggccgtctattactgtgcgagagattcttcccaaatgggttttgactactggggccagggaaccctggtcactgtctcctca

SEQ ID NO: 3839 - protein, 455 aa, Mus musculus
MHTIKLFLFVVPLVIASRVDPDLSSFDSAPSEPKSRFAMLDDVKILANGLLQLGHGLKDFVHKTKGQINDIFQKLNIFDQSFYDLSLRTNEIKEEEKELRRTTSTLQVKNEEVKNMSVELNSKLESLLEEKTALQHKVRALEEQLTNLILSPAGAQEHPEVTSLKSFVEQQDNSIRELLQSVEEQYKQLSQQHMQIKEIEKQLRKTGIQEPSENSLSSKSRAPRTTPPLQLNETENTEQDDLPADCSAVYNRGEHTSGVYTIKPRNSQGFNVYCDTQSGSPWTLIQHRKDGSQDFNETWENYEKGFGRLDGEFWLGLEKIYAIVQQSNYILRLELQDWKDSKHYVEYSFHLGSHETNYTLHVAEIAGNIPGALPEHTDLMFSTWNHRAKGQLYCPESYSGGWWWNDICGENNLNGKYNKPRTKSRPERRRGIYWRPQSRKLYAIKSSKMMLQPTT

SEQ ID NO: 3840 - DNA, 321 bp, synthetic construct
  source 1..321: mol_type = other DNA
gacatccagatgacccagtctccatcttccgtgtctgcatttgtaggagacagagtcaccatcacttgtcgggcgagtcagggtattagcagctggttagcctggtatcagcagaaaccagggaaagcccctaagctcctgatctatgctgcatccagtttgcaaagtggggtcccatcaaggttcagcggcagtggatctgggacagatttcactctcaccatcagcagcctgcagcctgaagattttgcaacttactattgtcaaaaggctaacagtttcccattcactttcggccctgggaccaaagtggatatcaaa

SEQ ID NO: 3841 - DNA, 321 bp, synthetic construct
  source 1..321: mol_type = other DNA
gacatccagatgacccagtctccttccaccctgtctgcatctgtaggaaacagagtcaccatcacttgccgggccagtcaaagtattagtagctggttggcctggtatcaacaaaaaccagggaaagcccctaagttcctgatctataaggcgtctagtttagaaagtggggtcccatcaaggttcagcggcagtggatctgggacagaattcactctcaccatcaccagcctgcagcctgatgattttgcaacttattactgccaacagtacaatatttattcgtggacgttcggccaagggaccaaggtggaaatcaaa

SEQ ID NO: 3842 - DNA, 324 bp, synthetic construct
  source 1..324: mol_type = other DNA
gacatccagatgacccagtctccatcttccgtgtctgcatctgtaggaaacagagtcaccatcacttgtcgggcgagtcagggtattagcagctggttagcctggtatcaccagaaaccagggaaagtccctaaggtcctgatctatgctgcatccagtttgcaaagtggggtcccatcaaggttcagcggcagtggatctgggacagatttcactctcaccatcagcagcctgcagcctgaagattttgcaacttactattgtcaacaggctaacagtttcccattcactttcggccctgggaccaaagtggatatcaaacga

SEQ ID NO: 3843 - DNA, 326 bp, synthetic construct
  source 1..326: mol_type = other DNA
gacatccagatgacccagtctccttccaccctgtctgcatctgtaggagacagagtcaccatcacttgccgggccagtcagagtattaattactggttggcctggtatcagcagaaaccagggaaagcccctaagccccttatctataaggcgtctagtttagaaagtggggtcccatcaaggttcagcggcagtggatctgggacagagttcactctcaccatcagcagcctgcagcctgacgattttacaacttattactgccaacagtataatagttattctccgacgttcggccaagggaccaaggtggaaatcaaacgaac

SEQ ID NO: 3844 - DNA, 324 bp, synthetic construct
  source 1..324: mol_type = other DNA
gacatccagatgacccagtctccttccaccctgtctgcatctgtaggagacagagtcaccatcacttgccgggccagtcagagcattaggagctggttggcctggtatcagcagaaaccagggaaagcccctaaactcctgatctataaggcgtctagtttagaaagtggggtcccatcaaggttcagcggcagtggatctgggacagaattcactctcaccatcagcagcctgcagcctgatgattttgcaacttattactgccaacaatataatagttattcgtacacttttggccaggggaccaagctggagatcaaacga

SEQ ID NO: 3845 - DNA, 324 bp, synthetic construct
  source 1..324: mol_type = other DNA
gacatccagatgacccagtctccatcctccctgtctgcatctgtaggagacagagtcaccatcacttgccggacaagtcagaatattatcaactttttaaattggtatcaacagaaacctgggaaggcccctaaactcctgatctatactacttccactttacaaagtggggtcccatcaaggttcagtggcagtggatctgggacagatttcactctctccatcaatagtctacaacctgaagattttgcaacttacttctgtcaacagacttacagtaatccactcactttcggcggagggaccaaggtggagatcaaacga

SEQ ID NO: 3846 - DNA, 324 bp, synthetic construct
  source 1..324: mol_type = other DNA
gacatccagttgacccagtctccatccttcctgtctgcatctgtaggagacagagtcaccatcacttgctgggccagtcagggcattaacagttatttagcctggtatcagcaaaaaccagggaaagcccctaagctcctgatctatcctgcatccactttgcaaagtggggtcccatcaaggttcagcggcagtggatctgggacagaattcactctcacaatcagcagcctgcagcctgtagattttgcaacttattactgtcaacagcttaatagttacccgctcactttcggcggagggaccaaggtggagatcaaacga

SEQ ID NO: 3847 - DNA, 324 bp, synthetic construct
  source 1..324: mol_type = other DNA
gacatccagatgacccagtctccatcctccctgtctgcatctgtaggagacagagtcaccatcacttgccgggcaagtcagagcattatcagctttttaaattggtatcagcagaaaccagggaaggcccctaagctcctgatctatactgcatccagtttgcaaagtggggtcccatcaaggttcagtggcagtggatctgggacagatttcactctcaccatcagcagtctacaacctgaagattttgcaacttactactgtcaacagacttacagtaatccgctcactttcggcggagggaccaaggtggaaatcaaacga

SEQ ID NO: 3848 - DNA, 339 bp, synthetic construct
  source 1..339: mol_type = other DNA
gatgttgtgatgactcagtctccactctccctgcccgtcacccttggacagccggcctccatctcctgcaggtctagtcaaagcctcgtatacagtgatggaaacacctacttgaattggtttcaacagaggccaggccaatctccaaggcgcctaatttataaggtttctaaccgggactctggggtcccagacagattcagcggcagtgggtcaggcactgatttcacactgaaaatcagcagggtggaggctgaggatgttggggtttattactgcatgcaaggtacacactggccgtacacttttggccaggggaccaagctggagatcaaacga

SEQ ID NO: 3849 - DNA, 324 bp, synthetic construct
  source 1..324: mol_type = other DNA
gacatccagatgacccagtctccatcctccctgtctgcttctgtgggagacagagtcaccatcacttgccgggcaagtcagaacattatcaactttttaaattggtatcagcagagaccagggaaagcccctcagctcctgatctatgttgcagccagcttgcagagtggggtcccatcaaggttcactggcagtggatatgggacagatttcactctcaccatcagcagtctgcaacctgaggatttcgcaacttactactgtcaacagacttacactaacccgctcactttcggcggagggaccaaggtggagatcaaacga

SEQ ID NO: 3850 - protein, 7 aa, synthetic construct
AGSSPGG

SEQ ID NO: 3851 - DNA, 48 bp, synthetic construct
  source 1..48: mol_type = other DNA
gcgaaagtgggagctactactttctactactactacggtatggacgtc

SEQ ID NO: 3852 - DNA, 48 bp, synthetic construct
  source 1..48: mol_type = other DNA
gcgaaaggggctggaactctttactactactactacggtatggacgtc

SEQ ID NO: 3853 - DNA, 51 bp, synthetic construct
  source 1..51: mol_type = other DNA
gcgaaaggggggggttcggggactttctactactactacggtatggacgtc

SEQ ID NO: 3854 - DNA, 45 bp, synthetic construct
  source 1..45: mol_type = other DNA
gcaagagacaagggtctaacagctcgtccgacctactttgactac

SEQ ID NO: 3855 - DNA, 57 bp, synthetic construct
  source 1..57: mol_type = other DNA
gcaaaagatctccgtaatacgatttttggagtggttattcccgatgcttttgatatc

SEQ ID NO: 3856 - DNA, 33 bp, synthetic construct
  source 1..33: mol_type = other DNA
gcgagagactcttcccaactgggttttgactac

SEQ ID NO: 3857 - DNA, 39 bp, synthetic construct
  source 1..39: mol_type = other DNA
gcgagagatattatcacatctcgcccgactttggactac

SEQ ID NO: 3858 - DNA, 33 bp, synthetic construct
  source 1..33: mol_type = other DNA
gcgagagattcttcccaactgggttttgactac

SEQ ID NO: 3859 - DNA, 24 bp, synthetic construct
  source 1..24: mol_type = other DNA
gcgagagggcggctgtttgactac

SEQ ID NO: 3860 - DNA, 33 bp, synthetic construct
  source 1..33: mol_type = other DNA
gcgagagattcttcccaaatgggttttgactac

SEQ ID NO: 3861 - protein, 33 aa, synthetic construct
RFAMLDDVKILANGLLQLGHGLKDFVHKTKGQI

SEQ ID NO: 3862 - DNA, 27 bp, synthetic construct
  source 1..27: mol_type = other DNA
caaaaggctaacagtttcccattcact

SEQ ID NO: 3863 - DNA, 27 bp, synthetic construct
  source 1..27: mol_type = other DNA
caacagtacaatatttattcgtggacg

SEQ ID NO: 3864 - DNA, 27 bp, synthetic construct
  source 1..27: mol_type = other DNA
caacaggctaacagtttcccattcact

SEQ ID NO: 3865 - DNA, 27 bp, synthetic construct
  source 1..27: mol_type = other DNA
caacagtataatagttattctccgacg

SEQ ID NO: 3866 - DNA, 27 bp, synthetic construct
  source 1..27: mol_type = other DNA
caacaatataatagttattcgtacact

SEQ ID NO: 3867 - DNA, 27 bp, synthetic construct
  source 1..27: mol_type = other DNA
caacagacttacagtaatccactcact

SEQ ID NO: 3868 - DNA, 27 bp, synthetic construct
  source 1..27: mol_type = other DNA
caacagcttaatagttacccgctcact

SEQ ID NO: 3869 - DNA, 27 bp, synthetic construct
  source 1..27: mol_type = other DNA
caacagacttacagtaatccgctcact

SEQ ID NO: 3870 - DNA, 27 bp, synthetic construct
  source 1..27: mol_type = other DNA
atgcaaggtacacactggccgtacact

SEQ ID NO: 3871 - DNA, 27 bp, synthetic construct
  source 1..27: mol_type = other DNA
caacagacttacactaacccgctcact

SEQ ID NO: 3872 - protein, 210 aa, Macaca fascicularis
MFTIKLLLFIVPLVISSRIDQDNSSFDSVSPEPKSRFAMLDDVKILANGLLQLGHGLKDFVHKTKGQINDIFQKLNIFDQSFYDLSLQTSEIKEEEKELRRTTYKLQVKNEEVKNMSLELNSKLESLLEEKILLQQKVKYLEEQLTNLIQNQPATPEHPEVTSLKSFVEKQDNSIKDLLQTVEEQYKQLNQQHSQIKEIENQLRMTNIQE

SEQ ID NO: 3873 - DNA, 24 bp, synthetic construct
  source 1..24: mol_type = other DNA
ggattcaccttcagtagttatggc

SEQ ID NO: 3874 - DNA, 24 bp, synthetic construct
  source 1..24: mol_type = other DNA
ggattcaccttcagtagctatggc

SEQ ID NO: 3875 - DNA, 24 bp, synthetic construct
  source 1..24: mol_type = other DNA
ggattcaccttcagtacctatggc

SEQ ID NO: 3876 - DNA, 30 bp, synthetic construct
  source 1..30: mol_type = other DNA
ggggacagtgtctctagcaacagtcctgct

SEQ ID NO: 3877 - DNA, 24 bp, synthetic construct
  source 1..24: mol_type = other DNA
ggattcaccttcgatgattatgcc

SEQ ID NO: 3878 - DNA, 24 bp, synthetic construct
  source 1..24: mol_type = other DNA
ggattcactttcagtgactactac

SEQ ID NO: 3879 - DNA, 24 bp, synthetic construct
  source 1..24: mol_type = other DNA
ggattcaccttcagtaattatggc

SEQ ID NO: 3880 - DNA, 24 bp, synthetic construct
  source 1..24: mol_type = other DNA
ggattcaccttcagtgactactac

SEQ ID NO: 3881 - DNA, 21 bp, synthetic construct
  source 1..21: mol_type = other DNA
ggttaccttagtgactttatt

SEQ ID NO: 3882 - DNA, 24 bp, synthetic construct
  source 1..24: mol_type = other DNA
ggattcaccttcagtgactactac

SEQ ID NO: 3883 - protein, 386 aa, synthetic construct
SRIDQDNSSFDSLSPEPKSRFAMLDDVKILANGLLQLGHGLKDFVHKTKGQINDIFQKLNIFDQSFYDLSLQTSEIKEEEKELRRTTYKLQVKNEEVKNMSLELNSKLESLLEEKILLQQKVKYLEEQLTNLIQNQPETPEHPEVTSLKTFVEEPRGPTIKPCPPCKCPAPNLLGGPSVFIFPPKIKDVLMISLSPIVTCVVVDVSEDDPDVQISWFVNNVEVHTAQTQTHREDYNSTLRVVSALPIQHQDWMSGKEFKCKVNNKDLPAPIERTISKPKGSVRAPQVYVLPPPEEEMTKKQVTLTCMVTDFMPEDIYVEWTNNGKTELNYKNTEPVLDSDGSYFMYSKLRVEKKNWVERNSYSCSVVHEGLHNHHTTKSFSRTPGK

SEQ ID NO: 3884 - DNA, 24 bp, synthetic construct
  source 1..24: mol_type = other DNA
atatcatatgatggaagtaataaa

SEQ ID NO: 3885 - DNA, 24 bp, synthetic construct
  source 1..24: mol_type = other DNA
atatcaaatgatggaagtaataaa

SEQ ID NO: 3886 - DNA, 24 bp, synthetic construct
  source 1..24: mol_type = other DNA
atatcatttgatagaggtaataaa

SEQ ID NO: 3887 - DNA, 27 bp, synthetic construct
  source 1..27: mol_type = other DNA
acatactacaggtccaagtggtataat

SEQ ID NO: 3888 - DNA, 24 bp, synthetic construct
  source 1..24: mol_type = other DNA
ataagtggtgatggcggtagcaca

SEQ ID NO: 3889 - DNA, 24 bp, synthetic construct
  source 1..24: mol_type = other DNA
attggtagtagtggtgtcaacatg

SEQ ID NO: 3890 - DNA, 24 bp, synthetic construct
  source 1..24: mol_type = other DNA
gtttggtatgatggagataataaa

SEQ ID NO: 3891 - DNA, 24 bp, synthetic construct
  source 1..24: mol_type = other DNA
attagtagtagtggtagtaccata

SEQ ID NO: 3892 - DNA, 24 bp, synthetic construct
  source 1..24: mol_type = other DNA
atcagcacttacagtggtgacaca

SEQ ID NO: 3893 - DNA, 24 bp, synthetic construct
  source 1..24: mol_type = other DNA
attggtagtagtggtactaatgac

SEQ ID NO: 3894 - protein, 182 aa, synthetic construct
SRIDQDNSSFDSVSPEPKSRFAMLDDVKILANGLLQLGHGLKDFVHKTKGQINDIFQKLNIFDQSFYDLSLQTSEIKEEEKELRRTTYKLQVKNEEVKNMSLELNSKLESLLEEKILLQQKVKYLEEQLTNLIQNQPATPEHPEVTSLKSFVEKEQKLISEEDLGGEQKLISEEDLHHHHHH

SEQ ID NO: 3895 - DNA, 18 bp, synthetic construct
  source 1..18: mol_type = other DNA
cagggtattagcagctgg

SEQ ID NO: 3896 - DNA, 18 bp, synthetic construct
  source 1..18: mol_type = other DNA
caaagtattagtagctgg

SEQ ID NO: 3897 - DNA, 18 bp, synthetic construct
  source 1..18: mol_type = other DNA
cagggtattagcagctgg

SEQ ID NO: 3898 - DNA, 18 bp, synthetic construct
  source 1..18: mol_type = other DNA
cagagtattaattactgg

SEQ ID NO: 3899 - DNA, 18 bp, synthetic construct
  source 1..18: mol_type = other DNA
cagagcattaggagctgg

SEQ ID NO: 3900 - DNA, 18 bp, synthetic construct
  source 1..18: mol_type = other DNA
cagaatattatcaacttt

SEQ ID NO: 3901 - DNA, 18 bp, synthetic construct
  source 1..18: mol_type = other DNA
cagggcattaacagttat

SEQ ID NO: 3902 - DNA, 18 bp, synthetic construct
  source 1..18: mol_type = other DNA
cagagcattatcagcttt

SEQ ID NO: 3903 - DNA, 33 bp, synthetic construct
  source 1..33: mol_type = other DNA
caaagcctcgtatacagtgatggaaacacctac

SEQ ID NO: 3904 - DNA, 18 bp, synthetic construct
  source 1..18: mol_type = other DNA
cagaacattatcaacttt

SEQ ID NO: 3905 - protein, 10 aa, synthetic construct
GPSSGAPPPK

SEQ ID NO: 3906-3915 - skipped (10 entries)

SEQ ID NO: 3916 - protein, 455 aa, Rattus norvegicus
MHTIKLLLFVVPLVISSRVDPDLSPFDSVPSEPKSRFAMLDDVKILANGLLQLGHGLKDFVHKTKGQINDIFQKLNIFDQCFYDLSLQTNEIKEEEKELRRTTSKLQVKNEEVKNMSLELNSKLESLLEEKMALQHRVRALEEQLTSLVQNPPGAREHPEVTSLKSFVEQQDNSIRELLQSVEEQYKQLSQQHIQIKEIENQLRKTGIQEPTENSLYSKPRAPRTTPPLHLKEAKNIEQDDLPADCSAIYNRGEHTSGVYTIRPSSSQVFNVYCDTQSGTPRTLIQHRKDGSQNFNQTWENYEKGFGRLDGEFWLGLEKIYAIVKQSNYILRLELQDWKDSKHYAEYSFHLGNHETNYTLHVAEIAANIPEALPEHRDLMFSTWDHRAKGQLYCPESYSGGWWFSDMCGENNLNGKYNKPRAKSKPERRRGISWRPRGGKLYSIKSSKMMLQPTT

1. A method of treating a subject having a kidney disease or at risk of developing a kidney disease, the method comprising administering an Angiopoietin Like 3 (ANGPTL3) inhibitor and a Solute Carrier Family 5 Member 2 (SLC5A2) inhibitor to the subject.

2. The method of claim 1, wherein the kidney disease is chronic kidney disease, a diabetic kidney disease, chronic glomerulonephritis, nephronophthisis, chronic interstitial nephritis, or nephrosclerosis.

3-7. (canceled)

8. The method of claim 1, wherein the ANGPTL3 inhibitor comprises an inhibitory nucleic acid molecule that hybridizes to an ANGPTL3 nucleic acid molecule.

9. The method of claim 8, wherein the inhibitory nucleic acid molecule comprises an antisense nucleic acid molecule, a small interfering RNA (siRNA), or a short hairpin RNA (shRNA).

10-12. (canceled)

13. The method of claim 1, wherein the ANGPTL3 inhibitor comprises an antibody.

14. The method of claim 13, wherein the antibody comprises evinacumab.

15. The method of claim 1, wherein the SLC5A2 inhibitor comprises an inhibitory nucleic acid molecule that hybridizes to a SLC5A2 nucleic acid molecule.

16. The method of claim 15, wherein the inhibitory nucleic acid molecule comprises an antisense nucleic acid molecule, a small interfering RNA (siRNA), or a short hairpin RNA (shRNA).

17-18. (canceled)

19. The method of claim 1, wherein the SLC5A2 inhibitor comprises canagliflozin, dapagliflozin, empagliflozin, ipragliflozin, luseogliflozin, or tofogliflozin, or any combination thereof.

20. The method of claim 1, further comprising detecting the presence or absence of an ANGPTL3 variant nucleic acid molecule and detecting the presence or absence of an SLC5A2 variant nucleic acid molecule in a biological sample from the subject.

21. The method of claim 20, wherein the ANGPTL3 variant nucleic acid molecule is a missense variant, a splice-site variant, a stop-gain variant, a start-loss variant, a stop-loss variant, a frameshift variant, an in-frame indel variant, or a variant that encodes a truncated ANGPTL3 polypeptide.

22. The method of claim 20, wherein the SLC5A2 variant nucleic acid molecule is a missense variant, a splice-site variant, a stop-gain variant, a start-loss variant, a stop-loss variant, a frameshift variant, an in-frame indel variant, or a variant that encodes a truncated SLC5A2 polypeptide.

23. The method of claim 20, further comprising administering a kidney disease therapeutic agent to a subject that is: i) ANGPTL3 reference or heterozygous for the ANGPTL3 variant nucleic acid molecule, and ii) SLC5A2 reference or heterozygous for the SLC5A2 variant nucleic acid molecule.

24. A method of treating a subject with a kidney disease therapeutic agent, wherein the subject has a kidney disease or is at risk of developing a kidney disease, by administering a kidney disease therapeutic agent, the method comprising:
determining whether the subject has an Angiopoietin Like 3 (ANGPTL3) variant nucleic acid molecule and whether the subject has a Solute Carrier Family 5 Member 2 (SLC5A2) variant nucleic acid molecule, by:
obtaining or having obtained a biological sample from the subject; and
performing or having performed a sequence analysis on the biological sample to determine if the subject has a genotype comprising: i) the ANGPTL3 variant nucleic acid molecule, and ii) the SLC5A2 variant nucleic acid molecule; and
administering or continuing to administer the kidney disease therapeutic agent to a subject that is homozygous for both the ANGPTL3 variant nucleic acid molecule and the SLC5A2 variant nucleic acid molecule; or
administering or continuing to administer the kidney disease therapeutic agent and/or an ANGPTL3 inhibitor and an SLC5A2 inhibitor to a subject that is: i) heterozygous for both the ANGPTL3 variant nucleic acid molecule and the SLC5A2 variant nucleic acid molecule, ii) heterozygous for one of the ANGPTL3 variant nucleic acid molecule and the SLC5A2 variant nucleic acid molecule and reference for the other of the ANGPTL3 variant nucleic acid molecule and the SLC5A2 variant nucleic acid molecule, or iii) ANGPTL3 reference and SLC5A2 reference;
wherein the presence of a genotype having the ANGPTL3 variant nucleic acid molecule and the SLC5A2 variant nucleic acid molecule indicates the subject has a decreased risk of developing a kidney disease.

25. The method of claim 24, wherein the kidney disease is chronic kidney disease, diabetic kidney disease, chronic glomerulonephritis, nephronophthisis, chronic interstitial nephritis, or nephrosclerosis.

26-30. (canceled)

31. The method of claim 24, wherein the ANGPTL3 variant nucleic acid molecule is a missense variant, a splice-site variant, a stop-gain variant, a start-loss variant, a stop-loss variant, a frameshift variant, an in-frame indel variant, or a variant that encodes a truncated ANGPTL3 polypeptide.

32. The method of claim 24, wherein the SLC5A2 variant nucleic acid molecule is a missense variant, a splice-site variant, a stop-gain variant, a start-loss variant, a stop-loss variant, a frameshift variant, an in-frame indel variant, or a variant that encodes a truncated SLC5A2 polypeptide.

33. The method of claim 24, wherein the subject is: i) ANGPTL3 reference or heterozygous for the ANGPTL3 variant nucleic acid molecule, and ii) SLC5A2 reference or heterozygous for the SLC5A2 variant nucleic acid molecule, and the subject is administered or continued to be administered the kidney disease therapeutic agent and/or an ANGPTL3 inhibitor and an SLC5A2 inhibitor.

34. The method of claim 24, wherein the ANGPTL3 inhibitor comprises an inhibitory nucleic acid molecule that hybridizes to an ANGPTL3 nucleic acid molecule.

35. The method of claim 34, wherein the inhibitory nucleic acid molecule comprises an antisense nucleic acid molecule, a small interfering RNA (siRNA), or a short hairpin RNA (shRNA).

36-38. (canceled)

39. The method of claim 24, wherein the ANGPTL3 inhibitor comprises an antibody.

40. The method of claim 39, wherein the antibody comprises evinacumab.

41. The method of claim 24, wherein the SLC5A2 inhibitor comprises an inhibitory nucleic acid molecule that hybridizes to a SLC5A2 nucleic acid molecule.

42. The method of claim 41, wherein the inhibitory nucleic acid molecule comprises an antisense nucleic acid molecule, a small interfering RNA (siRNA), or a short hairpin RNA (shRNA).

43-44. (canceled)

45. The method of claim 24, wherein the SLC5A2 inhibitor comprises canagliflozin, dapagliflozin, empagliflozin, ipragliflozin, luseogliflozin, or tofogliflozin, or any combination thereof.

46-85. (canceled)
